United States Patent Application Publication US 2026/0258423 A1 - sequence listing, part 30

SEQ ID NO: 167803 - DNA, 46709983 bp, Homo sapiens (residues 38,368,923-40,037,136 of 46,709,983)
  source 1..46709983: mol_type = genomic DNA
catgtccctgcaaaggacatgatctcattctttttatggttacatagaatttcttggtgtacatgtaccatattttctttatccagtctatcattgatgggcatttaggctgatttcatgcctttgctattgtgaatagtgctgcagagaacactgaggtgaacatgtctttataatagaatgttttatactcctttgtgtatatacccagtaatgggattgctaaatcgaatggtatttctgtctttaggtctttgaggaatcaccaccctgtcttccacaatggctgaactaattcacactcccaccaacagtgtataagcattcctttttattcacaaccttgccagcatctgttattttttgactttttaataatagccattctgactggtgttagatggtatcttattgtggttttgatttgcatttctctaatgatcagtcatgttgagctgttttttcaaataattgttggccacatgtatgttttcttctgaaaagtgtctgttcatgacctttgctcactttttacaagggttgtttcttttctttgtaaagaaattaataaatttaagttccttatagatgctggatattagacctttgttagatgtatagtttgcaaaatttttctcccattctgtagattgtctgtttactctgttgatagtttattttgctgtgcagaagcttgttaattagatcctatttgtcaatttttgcttttgttcagttgcttttggcatcttcatcatgaaacctttgcctgtgcctatgtcctgaatgatattgcctaggttgtcttccatgatttttatagttttgggttttacatttaagtctttaatccatcttgctttaatttttgtatatggtgtaaagagggggtctagtttcaatattctgcatatgacttaccacttatcctagcaccatttattgaacagggaatcctttccccattgcttgtttttgtcacttttgtccaagatcagatggttgtaagtgtgcagtcttatttctgggttctctattctgttccattggtctatgtgtctgttttttgtaccagtaccatgctgttttggttactgtagccctgtattatagtttaaagttgggtagtgtgatgccttcagctttgttctttttgcttaggactgtcttggctattcgggctttttcatatcagactttttaatgtttgacaatatggtgggtgcaaaatagatattattttgattttaatttatatacccttagttaccatgagcttgagcattgtttataattaattgttcatcatgtttccactcttgaaaagtgatctattcaattcttttgcatatttcccaccgtttttacttgttgatttacaatagttaaacattttggttactagtgttttgcaggtgatatgagttacaaaactttctcccagcaggtagtttatcttttcactctctttaatgatatattttaatttaaacacccttaatgttaatatagtaatatctatcaatatttcttttacaggttgtagtttttatgtcttgttttataaaaccgttttgcacctcaaggtcatattctcctgtaataccttctaaaatgctttataagtttaaattttacatttaaatccttaatcatatatgtgtgactgatttttacatgtggtattatgtaggggtccaattaattttccccattataaagatttctagttgtttggcctcatttattgaaaaatccactctttctgagttgatgtttagtactatttctgattatatcaagtatgcatatctgttagattagtttatggactttcctattccattgttgtgtctcttttgagccatccatactgttattcttaattacaataactttataataagatttagttcctaggggaacaaaaaacacaacacatgtgctgtgctttcaagcatagctgggcctgtgcaatctggccctctgtgtaattttaaaaacagcttgtaaaaaaaaaaatgtactgccggattttttttttcagaggaattgcagtgggtttctagattatcttgcaaacaatagacatctttataatatggaattattaaatccatgtacatgatccatcacttcatttgcttacgttgtctttaatgtttttaaatgaaggtttattgttttcccataaagctcttgcatatctttatagaattattcttaggtattacatttttatgctattgaaaatgatatatttttaaatttaaccttctcaatgtatatgttagtatgtaaaaatgcaattgaattttgattccaacaattttgctaaaactcttaaataaaattcaaaaattaacctaatgattaattagaattttatacatgcacagccatattttctatgaataataatagatttgtttcattccaatacttaccatttttatttcttttttccttaccatagtattctggtgagcctccaaacctatgttgaatagtaagcatctttttcttgttcttgacagcaaagaaaatgcttttaattatatagctttatgtgaaatatttgctatacattttctatagacactattatcaagttaaagaagtcatattcttttcttagtttgctagtagttaataagatatagatgcttaattttactttctatatgtattcagataatcatacttttttcctataatgttttcatgtgggggatacattaattgatttcccgatattaacccaactttgcactattttgatcaacccaccttgatcatgatataatttcttttttatacatggctgaattctccttatgaatatttggttaaaatttttgcatcttgcattcataagaataattggcctttttttgtactgttattgtttttggcatcaaagttatgttagcctacaaattttaaaaattttattggggagtattattcttttttatattctccaccatattttgggaaattttggaccttaaatatttgattgacctaactgatgaagccatctgactttagctttctttgtgggaaaagctatgactatgaattcagtttctttaatggctgtaagatcattcaggttttctgtttcttcttgtgtcagttttgctaggtttgttttctacacaaatttattcatttaatatacttttcaaacaaataggcataaagtagttcacaacatcttctaatcatttgaaagtctttagcaaccatagacttatccccatttttattcttaatattatctgtcttttcttttttaaagtactctcactaaagacaagatttgtccattttattaatcttttaaaaaactccaatttttatctttgttgattctctgtattttcagttgttcaatttgttaatttctgttatctttataatatcccacttcctaattgtttttatttgttttttgtttgttttgctgcctttttgccaactttttaaaatggatgcttagtttactaattatcatccttttttttctatttcaatataaatatttaggactataaatttctatttgctgttttagctgtataccacaaattttatatgtattttattatattaaatcatattgtctaaattacattgtaatttcttttttgaaacgttagtatatttcctaagtaaatttttctacttaacttttaattgacatctagcataattactttaggtctgagtaggtattatattattttagtcatttaaatgtgttgtgattttctttataaacctattcatggtaaatttgtaaaaatgattcatgtgtaagaatttgtattttttagttgttgggagcagtactctaaccccattaagtcaagtttgttaatcttccatttcttgttttttttttcacctgttttatcaatagctcacacaactatattaaaaagtaggtatgaatgtagtgcaagaaattattttcttcttgttataaaatcaaaatgaaattgactccaccaagaattggtgagaattttgaatattttaatgtcatcatcattgtgagttctgctctatccatagatcctggaagcaaaagtcttctggtcctcagtgcacactctttgctccaaaccctataggttgtggtttcagtgtcaagtaaaggtacagggatccctgatggggctagaatctgcataaccaaggcttcagctccctggcagagccacactctgaattcctgtaagtatccaggacttaaacattcataatggtctaggtccccattgcttgtgaatcctatagactctaatcttttcccattaatgggataacttctcccaacatctctctcgttttgctactcttcttattgtttccttttacattttgttttcaaaaatttccccaagaactttgagaagttcaatttaaactactctaccttgggcttgagggtggaggaatgagatgctgagacgtaagatctggtaataatgcctacaataggcatatttccctccacagaaaggtcagtacctctgtaaatatacaaaccaactgcctggcttcctgtttttttctgtatcacgttcttgtagtaccattgagaaagtagcactgggaggttgaaaatgtacctggctagcatccaagtcctgggtctgagttcaagctctgcttttcactagctacatgttttaagatgtatattaccatcttggagtctctacttctcatcttcaaatggggacaggaattctgcaagactctgaggtctacaaagtcagggcctgtgttctatttctttttgtattccttgggcctaattccacatctactattgtagatcaaatctttgttgtgaatgaaagaataaataaatttctgtcttcaagattttttgctatgatgaactgagacagcacatgagtaagctctttgtaaactatttttttttaagcacatgaaaaatgtatattgttattgtcacctttctattatatttcacagcaatgtgagatatcctcaaatatgcttttacatccctcatcctcaaatgtttagatcatcccccaatatttacatatttttcagcaattgtttaatataatctctacccaaggaagagatagaagccacttgaaaaaaagtcttagggacatctcccaaaactgcttattatttgaatggcttatattttaaaatgtgtgcagccaatttttcgctctcttgtgctccaacccttcttcataccacaggctgtgggcgtctgccccacagaccctgacccaatgacagatgaataatgtacactgacacacagatattctgctttgccagtccagctaagtgtctcagctgcttacagactccctggagagtactgtaaacagttgtcgaccagctagtgagacttacatttatttggtaaagattaattgacaaaggctcgagtcaacaccactacagggtaattgacaatgtggacttcccgagtagaaagcaattaagcacctgtggtaaatcaaaggttagtcttaagaccacatgagtaaacaagctagctagaaaaactctccacattcctttgttactactttaatatatttaactaaaggtaaagggaccaggccaccttcagccagatctattaccgaagttatgcaaactctcaggccttccaagagagtctgtggctgttactataaccatctttaatatttttcccaccagcctgattgaacccctacaacagactatggtaggtcagacccagaagtgccaagacttttcagacatggtccacaggtgtagcaagatgccccaagccccactcctcagtattttttggttcattaaatacaaaaaatgaacgttgtacttggccttatattgttttttaaaccacagactgcttgggttttgttttgttttgtttccatcactagtatgttttgctcctgaagattgttttctgaccccatgcctttgctcaagaaaagaaaaaattccctgcctggaatgcattctattcatcaaaacccttccctttctgaaatatcacctccttcaataagcctttcctgctcagcccactatatgagtatgagtatcctcatactcagaagcagctcacacatgctaagctgccctactccaattaagaagaaaatactaacacagcatctatagctttcattcaaggaaggctgagtacttgttaagatcattttttctaagttcacttagctgttaaagcagcaagggcaggatttggatcaggttctgtttggttccaaacccaccatgaggagccactgtgctgttttacctctgagaaagacctgacttaaaacccgacctctatgttatgagagtcaggctcctaggatggggaaccacgataggtgcatgcatgtcttgtcttgcattagagatttttatgtacattttccctttctagattataatctctccaagggcaagaactccctaacacctttctgtacctcttacatcattgtgacatcaaagattcttagcaaatgcttgttaagtaaatgagagcagacattcttgctccccactgattttatcttggatgctaataatacagtaaccttatttccaaaaaccattcccacagagcccgacacaccgtggaacaaaaactgagaattggattgaagaactggattgagaaaaggaaacactttggtgaaatcacaacctgtaaacagacctcaaaacatagtgttcactcaactgaagctgaacgttctatagcctgggttcatttggcttgattgcgcatcacttgtttacttggtgtgtataacactccacaggagtcacagggtccttttataggcatctctggtctgttgtgggccccgggtagtcatagtcccactgtcttgctcattatcctcctgcacccccaacacaactggacatcacacactaacttaacaattcagcctccttccaactgtcttaccccttctatctagtttcttcctgccttaattaacttcctagcatcatatgaataatcatttgtttgtttgctcatcctattgtggttgcccatcctatgatcttaacaagtactcagccttccttgaatgaaagctatagaccctctgttagtattttctttttaattggggtagggtggcttagtgaacatggacctgacagtgttggtttaaaatccagtgaccattgcatagttccactttaaaatgccctatgtcacattagtgtgaatgcacagaggcacagacaggcccagggtctcaggttagaaaatatgatgaggggaggggtttcttctaaagagaactgtggaattgtcggatgtgaatctgggcctgttgttcgtttctcgctatgcatgtttccatgggacggacactcagttgttactctcgctctctcccaccacttccgctctctttcacaggaagaggcgggtcctaccctgatggaaaccggttctggtctctgtccaatgggagtcgcttcctgtcctgcaccttcccaaccacatcagtgaaagggtggaagtgctggtctgcccactgcaggcttaacccatgttcttcctactaggaaagggacgtttccattttcatccacctgactcccgagttggttgcaaagatggaagaaaggaacagccatttattctcctggaggcaggccctgccggacttgagagggcctttcctctgaccctaagcatcagagcggatggagacagaaaatcctgaggccgctgtatggtgggtctcttcacagccatggggcccagccccactcgcctccaccaggttatggcccagcagctgggactccgtccagaagagcacctgcagcacgtatcctgtgttctccatcaaagcggcctggagtccgcctgcgtccccagcaagcagcactcccgccctaaaaccaaagggcgcagcaaggaaatgggagggctgcgctttgcttcctgtctgataactaccaacaaccgggcttctgcccagcatagctagataaggggagggcactccatttgacatgccctgaagactgtccaagcgatggcttaggaaggccattccaatttcaagtcctgaaagctgtaagatttttctgtgacttagagtgatttataacatagtttaacctctcaaagcttcacatctgtaaaatatggataaaactatctcaaagcggtattgtgcaagttaaatgaaaaagatagtgtatgcacattgtttggcactaagctattattattatcaaaagtagtagcaattagtattattgtttaaaggagaaaatgatatccattgggaggctcctctttggacctgaaagcttaatatctggaattacttagaactggaatgccagcctccgcctcctgccagcagcctgctgccaattctgatgagacagcttagaaaccattgccctgatgccatagaaaagaagaggacagctagccttttcctttctcttcacccttaatttaaaaaggttgggcaagttacacatccacccacctccaaacctttcaaacaagtttcagttatattcttgccgagtagaaaaaccaaaaattaataagagaacttacttaaaataaaaagttgttaacatcttgatacatcctggctttccagttaagagactttacagaatggttcgtgacttctacaccaaattctttcttgtatattttgtctacaccccaccccttccttagcctcaacctcatgagtgcaaatggagatcagccctggctcctggcatcccacgacgacttggaggtggaaattgttagtctggagtgggattgagggcccctgaggcagactgacactctttcagctgatgcatgtctaatgctgagcaggctgtgaccaaccaccctcaggacatgtttttatgcaagtgtgctgtagggggtggtcttcctcataagtgagaaaacatgaaagcaaagttcatttatcccatcagttggctgcttctcaccattcacctgggccctgcagtgctgagaaaataggatgtattttaatctccaagcagactggactccaatcaatttagagacacagagccacaacataattcaatttggggtgattccactgtctctgtaatgtctaaagccctaatgtactgctgactcttaggacaaactggcactgatcaagagtgaggccactaagccatcactgatttcagactctcacccctgactttctatgtatggacaacacttaatatttcacagaacccaagttgcactggaccgaagaagacctaaatagccatgtagtccatgtgctgccaaacacctggcaaatagttgcatggttgttaaataagcacacctcatatccaggaactcctggacaaaggctgaccattccatctggacctcctccaacttctaaaaagctttctcttgaatttggccaatgggcatccctgctgagcccacctttagtccagatgttacctttctggatgttcattcatgcatatagctgcaaacgttttccaacagcttgatattgctaggcactgtgctgggtcctgaatcaatgggtgataagggtaatcccactttcagcagagacactgacagcccctacttgacatggtcctgggttctctcattccccttgtctctccccactgaacctgcactaactgtcctatgtccctctttaagtgtaggcccagaattgatgttgcagtctaatgtataacaaataagtcctcgtttgtgacctgtttcagaaaatgcaacctaagattgggcagtcatgtcaccttcccgtttaattttctgtccatatgaggcaaaatagcttaagattaagaaaaagcttttggaattaactagccctggaacaagcatttgttgcacctcttacgctgcagagctgggcaaattgttcaatctgtcaagacatttttttaagtgtaccgtaggggcagttggaaggagtaatgaggcagtgtgtatacagcacctgacctagtcatggctcattaaaagctgctattctacatctcattgctgtcatctccaaaacgctgaagtcttttcacatgtgctgctgctccatcaaactcccagatgttttggggaggactggatggaggtcctaacaccttcaagatctaacccgtcacctcagcctgttctttggcatcctggatgtgtcacataacctattgtcatctcagccccatggcatttggagctgagatcaggatagcttctgtatcctcatctgagtaaagtatgaccaagtaagttcaagggccgcagcctggggtttaatcctgcgacctcccttctagacgagcatccattttttaattagtactgtttggctgtgcttattcaatgagtcatgagtcataaacttgtaacatctccagattgttttatgaagtcatatcaggatgaaattctgcctacctactatttctgtattatcttctttaggaaacatgccatgtggctacagaacatgaaaaaaccattttttttttccataaagtttctacatataacatgcttcctgcagaagtttgtaattcacatattctagcactaattataatcaggtaatattatgactttctccaacagaataatagtttaacatttttttgtgagaagataatgatgttttactcagtaaaatgagtttaaaattacaagttagaaaagtttatctagttgtttctatatagcattaatctgggctgctttgtcaaaaatttattttatttttgaatcagggtgtcactctgtcacccaggctagtggcgtgatcacagctcactgcagccttgaactcctgggactgcagttgtgcaccaccatgcccggctttttgtatttatttatttttttgtagagactgggtactctcatgttgcccaggctggtcccgggctcaagcgatccacccgcctctgtccttcaaagtgttgggattacaggtgtgagtcaacaagatttctttaaaccaaggttaaaagataaaaagaaggcacagaatttggtgtatttttgagtagtccaaagtaatttttattctctaattagtcacctcacgactttatttgaatgaattaatgagaagctaaataaactagctttttaaaaaatattttcttctctttctccaggcaatgggtcactttggggcgctgcagaacatctgtgctttccctgtgccccatcaccttcccagctcctgagctgtagccatctctgctgcacctgctgtcagagggcagctcctccggctcctgctcctgggttgcaggtgccacatctgtgcagaaggcttaggagaagcagtgagccttctaactgcagcagtcctgacaaagcactttgtgaacccctccgggacataagggcatcaaactaggaacaaaaacacagtcttgactgtgatttggtgattttaccacatacaaggcccgaaagccaattgaagacaagaaaagaagacaaatctcttgccagcaggagtaagattgtacaggagtctgagtatacatcagggcaagccaagagacagggacaaacagagagaaaaggttcatgcaattatgaatatgacctggagggggctttggaattagattacaacagtaacagagagttaatgccattttgaaacaatttaagaattatgtatttgaaggaactcagtattatcatgttatccaaaattatcccagttgctcataagacttgctaataacctggactgggggtggagggttgagggatctaatggaaaacatctgttaaaattgaatatgataatcatgtcttgtttttatgatcttgctcatgagacagtcttgaagagagaactgagtgattatccaagtaaatgtgtatttctatgaagaatgtaggtgtgtcttgactttgcattccaaaataaaaatgactgatcttttccattagcacagtttgggtcagcctaactgccagctttcatgattgtatttatttattttccctaaggagatacgggcactttgtgggccttcccaggctgctgcaaaatgatggatggttgggctccgtctaatccaaatgacacggggtgtcaggagcattggtaatcgtgtcctgccgacttcaaagcccactgccaaaacatccacagcacagaggtttggcaacttcacataatcatagcaaaaggactgcaacgtgaaaaaaacaggccctgaaacagctatgaaaagggccagttcagaaacctattcagctaagatgtttcggctagcgccttcgcacggtcaccttgtattttcaccttttgagttgccttcacctggaccaaggttggcagcatttgtgattcaaagaaaagatgcccagggaaactgactctagattatggaaataaacattgtcttcaagggatagccagcaacatcaggctcagggctagtgaatcccaagccacagtgcccaggtaactctgatgtagcaggactaaagctgtctacctagtgagagctcctgaaagagaaaccccgcagcaaatctagacgttatcccttgtttctgtaaagtgagaaattgcagctatccatgacgctttatttgccagtaataatacagtttgccttacgagtggtagcttgttcactgttcaacaaatgtattttaatcatagcaggaattaagggtgatttgtgaccaggtgctgaactagaatttctcaatgacaaccccagcttcataggcctctttccattccaggcataaatatggaggctccaatgtgaaacccggggtccttctgttccaaaaggggctagaaataaaagacaggaggggaggcaagaaggacctggagaggctgacgccatttgggtgccaaacatcctatttccttggctctcccttgcacaagttcctggacaaagtaaattataacacaaaatccacaacattcagcacatgttttcattaagcaactttagtcactaaaaaaagtgcaaatgcagactcctgtataaatctgatttgccatgctaggccaagcttattttattacatacattctgcattctaagaactaataacttcatattgtaaacattaagcatacagagttaaaattcaaggccacattatatcgattgtctcttttgtcgtgtgtctttggctggccgagatcaactcgtagtgtataaatgcataagttatataattattatataaaaagggggaaaaacattgacttgtatacttcattctgacaaacgcacagcgttcgcgactcaaaggaaaactggaggccgcctacccaaaatgcctgcgtgatttctgattgtggcagccaagaaggccatctcttacctgaccctgtggagaacaaagcccccacataatgatgaggtcctgaatgtttctcttaaatatcagacaattccagttaaaattttcatttgacaaacaaagaaagagatgcgcatttttgtttctgaattctactacttcccctttctccattacgctgtgtcctttctcctaacactgggtttggtataacactgactgcatgaaccctcgagtctccataactcattgtacacagtccccaaatgtcctgagtccagtcttcattgcttgagaagtttctttcccagccctggtctcctccttctctgcctcttcctcctccttcttcacccctctgtctacaatcacacgctcactctatacacatcctcagtcccaccttttagttcatagtcccggtaatactgtaaaggagttggaaactttgggtcatcttcacagtttgagaaagctgacagctgtccatcaaacggaatgtatttgatttcaaccaaaacagcacatgccatgcagttgcatatcaacgtctgttgatgggccacagtctctctcgtgtcttttctcttgtttttgatatgtttctatttttaaatacaggtagttttccttaaaatggcattataaacggtatgttaggtcaaaactgtgttgtttctattgctttagtttcatcccagtttgcattagtgggattccaaactctactctaaagtttatacatttcttaagaccactttctttggcactttgtccttaagacttcatgcttctacatacactgtcttttacaaggtcagtccacagatgatatgtccatattcgtgacatttttagcatcctcctcatttctgtagtaagacttcagtaactccctcccaagagtctttggatctcttccccggcttccttccccagccccagtaaagcttttttcattcctcttgaggcacttttgattcatgttctccgatagagtttgtggcgatgggctggtgaatgcacgctgatgggaaaagcctccgccaggtctttagtagtaagtgcccagatgagaaggcatatggctggtggggagcctagtgttggggtatatacccccagttggtgaattccagtatgggtttggggcagcaaaaaaactggaagatgtcacggggagggctggagggtggggcgccacaaagttcatcttctgtgggtgggcgtgataggagcccatgtacgggaggtctgaggggtacttgtacagagatgactccggggggtggggctggagggcctgggcgatcccgtggaagtcgaacttgtaggcgtagcgcttcccatggaccttggtcatgatgttcttgtcatagtagtaacggagggcgcggctgagcttatcgtagttcatgttgggtttgctcttccgctctccccagcgccgggccacctcgtcgggatccgtcatcttgaactccccgttggtgccttcccaggtgatgcagctggagttggagctgtccgacaggagctccaggaggaactgccaaagctggatctggccactgcctaatgaggtcaggagaggaaggaaaactccagtgagcacaggttccaggggaaagaggctctctgtgatgacggaaggaggtgctattggtgtgccgcccacattcccttcaccaggcctgtccgtccatccctcagctgcaggggtgcggactgctctcgttccatggccacccacttctccagagaactgcccttgcctgaacagagccgccgcctcgcccacccccaggtatcccacagctgggtggactgaacggggtaccacgggccggcccccttgcctcaaggaaagaccaactccatgacgctattcaggcttcagggctcccgtgggattgggctgaaacagcgtccagctgcaaggaggcttggaggaggccagaaacttccttagcgctgcccctgcagcacttcccattctctctctcctgagaacatgccgttaatcagtcacctgcacaagcaggcttaccccaagctctgcatcaagggaacccgacctaggacgatgatctaacagattcaagacctagatggaatgcagcgaattcatatggggcaaagttcaggctgcttccatccatttctgacgtccttaaaagaacagccagatcaacctggtgtttaggggatgaaagagctatatatttttttttcctattttgtgaagcacaaagtactgttatgtggatggcaataatgacttaatgccatttatattggctaggtcaagtaagataataaaagttagatttaggaaatgaacttctaaaagtttatggaaaaaaatcgagaatggaagtaaacaccattatttctaacataacattttgctggcgctcagaaagcaattctgtgaaaacttttcctagaacagaattaacccactcaaaatgaggaagtttaggaaaaaaaaaaaaaaagctggctctttttcaaaccagatcacccagttccagtatttgggcaagcgcatcgtaacggaaaccagtgccttgcctgtgtgctgcaacgccaattgtgttaagcagcatttccagaagaaaaaccccaacaatgagtgattgcaagtccccttgggaagctgaatgagactcttcctttgtcaaagagatcacatttagctgggtggacaaagtcagaattttcttgatttcattgaaatcatacagatacagctttgttttatgaaattcaaagaaaaatctaggcacatcattctagctgctatgttacaatacttgaagatagtttatggctccctagaagacagcagcatgtaaatattgacagcagtatccgtaccaagagaagctaagctgtgctgaacatatttcagaagcttaagaacagatgggaggtgggtctttcctcccaaattccagttacagcactgccttagacttattaccaaaagattaccttttattatagtgtaagtaatatcaatcgatgtgataaaatgattaaagtaactttaactgacatctactcagggaagtaatatactgtaaaaatcaattttacgttcattttcttctaaatcctcgctagcctcctgtacatatcacccaacttataaactctgctttgcatgttggctacatggacatggatatttttgtgaatttatccatacaatagcactgtgagaaaggtcagctttttctgaatctatgctggaaagtgctcattttcagtctagcaacacatttgaaatgtattaacagcttgtagctcattgaagtggaagcctttgctttttcagaaccacatatacaaactgttcccaatcaagttttgttgcctccaacattttattaatatgcatttagaaaatacaaagaatggtatgagaaaaccatatggtcttagtatatatattgtaaccaaaaaattacaacttgaaaaaattccgtatatgacctgggaataggaaaaggcatggatttttgatttaacagtctaacagatgcttcaatataaacacatacggttgtttgaaaataaatattcagcgtcaactttctcccatagagaaagcaactccacagacctgccgaaatcacacttggaatctactcaaaccttggcattgcctcttagcaatttgtccctcacccatttctcttataaacgtgtgtaggacagaatcagtggacaaaagtgatctcatgtctctcctatttctgaagagttagaaagcaggggacctaaatttgtggcagcaaactctatgcccaaaggatggatgagctaatttctcacttgactattttacccagtagccataaagacatagggctcaggactgtgagaatttcaagggagggtctatagaaataagagaactgtaagcaaaattcatcagctttcaaaccttgaaagaaacctggaaatgcaaaatcaatgaatgtttaagtaaatggtagaaagagtaacatcatgtcaaactcattaattgttaaatttaatatttgtaacaaaattcgctgcattttgcagtgtgtagaacaaaatttctcactgcaagaattctcaaaaatgaacaatggttgttaaaaaattgtcagtggtaaaggaattattctcagtcataaaattttaagagcaatttttaaattcttattttacttccaaaacaataacatttaatgtgtgacgaggtgcattttagaatatagaatagagatttccaaacaagaatgcttagggtttaggaaagcctaaaagtggcttgggtcactcatgggccaaaccaggatttacaaagagaagttcttgaaagacaagagctttcattgagtagcatcaccacctctaccttaggactcacctttcttgggtaaacccttcagatctattttttttttttactctctcttaataacatccttgcgatgtcagtaaggaggaactaattttttcttagggtaattaccaaaataaaacatatttggaggtaaaaaacagtggcaagcagcattgtccacctacagagaaccctgtgggtgaaagggagcggctgtggcttttaagaagacagaggcactcctttaattttacagaggaaagtaatctcctaatattgttaaaagaaagggagagaaacagggtagcaaaggggtacagactgagcaaaaaagggggaaaaaaaaactaaacggtttacaaaccacagagcaaagcagagagctgcagagtgagtcagcagctgtgtctggtggaaacagcatcctggtgcaaagccctgcagccgtcagctgatgaacaagggcagtaaatacagccgtgaggggccccaccagtaccatgtggcagtggtttggggccactttctctagaagccaggggtggtgcagaagatcccgtgtgcatggcctggaccctctgcaaggcagcaggtgtgtccagcaggtgtgtcctgaatggaagtctctgccccgaggctcagtgaggctcaggcaccacttactggaggggcaggaaagcatggtggtagggagcaccaactttggagttgccactgcttcagctgaatcctgcctctgccctttgtgggacgtttggcaactctcgcagctctctctgcctcagtatcgtcatctgtaaagtgggggtgatggtaatagtactatcttgcaagatcatggtaaggatgaactcagtacttgaatggtcttgtcagaatttctttgggctgaaaatcagagtttaaggaaagataacactcctctcctatagccaggaaatgcctaaagaaagagaaatactgttcaattggcctattgaaccatgaagaagcttgaaacggtgctattcttgggctgactgatatcctctgaaagcttactgtgtgccatgcaccattctaaacgctttacatgtattggtttatttaatccccacaggaatcatgtgattagtccattggagaagtgacgaaattggagcttagagaggtagactgacttattttgcttagcgttggcaagggttgaaatccagactctaggctgccatgcttaatcactgcgcaaacttgctttcaggcctggtttatgcacacctctgtagcctcctcaggtcctttccatgttgtcccctccctgggggactcccactggaagactgcacactgccacctcctaacaaatgggaaaacatccctagcctggtctgtcgttctgcaagaggcaggatgtattttcatgtgcaccattgaagagtatccagttagcatcaaggaagcctctgaacataacccaccaaagctctttcattagaggaaccatgttagatagattctcagctgctctgatgggatgtaaaggagctgtgttgcttataaccgatccatgatatcagaatgcagggacacactgttctcagcaggaaaagtgatgtccaaagtacacatcaagtgaatatttgggatagagatgttgggatgctgacatcatcctgtgcattcatactatatgatgcaatctttccacttaaaatgatgaaaaggaatttgtattgtatgaagagcaaagacagcaatttttaagtgatgaaagatttatttatcagagaatagaaaaatagaatcaaacaggaagaagcattgtcattaatacaaagataaaagacattctggtttcaggggaaaagttcacatgagcacaacagacacaaacctaaagatagatggagagaaagtcaaattcatcagaaactaaatgaaataaatctttatcttaaagtcacttgcctgcaaatcaaagatgggatgttgccattttctccaggcccattaagaacagtcttaatggtatgaagcacagtcctccttccccaggcctgtgatgagtttccggtctccttgctctgagctcaggtccctctatctacaaagggcatccccgggctgctgggcccagggcatatgcagtgttcccttgtgaaagctggcactttgcttaggagcaagtgactcaggccctattctacaaacaagccaagcagtacctttgggctgtgacaacgtggtcatggacatatatgtttcatttggccaatgtgtgagtgcaaaggccagtttggtcttctttggtgcagcttgactctttcctcctcttccttcctgacctcagattcatcgcctgcacctaagcagttatgaccctgaaaggaaatccttgctttctattctcacagtccgcattttgtaagacctcctcttcccttcatacttagtcagtggcagagtagggcaagaaaacaaaagtagactttgcagacagagtcaggtttctaacctgacctcccttatcattggctgtgtgacacaggaaaagttacttaacttctctggacttctaattccttttctgtaggatggagatagtaacctcccagggctgttatgagacacagaagggaccacagacattctatggggggcattctgcgggatgggagctgtttgattgttatttcacatgattgtattaacattcccagagtgtttcagcttccgtcattttcttttttctaatctatcctgaacattgctgccagatcagtcttcctgaagcatgactgataataatcatctcaaaacatagtcattatttttatttgaatggttatatggcagagttgcaaatgaaaagctgagcagaaggctgagaagagaccacagcctcaggagcctgggctactagatgaaagccagcatgagcaaaaagggcctgtggctctgtgtttgggacaatgttgtaactacctgtgtccatctctccacggaccaaaagcaccctgagctaaaggactatatctcattatccttggcattcatgtatgcaacaaataattattgagcacctagtctaggccccaggctaactagttttctttagattttcagctgtgtaaaaaaaattcattgaattcattaacattaaccaaaatttaacttcaaaaatacagatgttcaataatgataacatttcgtgttttcaatgtgtagattctcttgcagggatgtacactgattaaatcttaattattccatttcgaaccttattttggcctcaacgtttaggaaatacacattccatcttgtgcttgcaatatgcctgtaacatcttggcatttgaatttgcagttgggaatatgcagcataggctatgaatttctgaagctggtgccagcacagctggttctgatctgaatacaaacaaataaaactatgtggttggcactgaaacactaggacaggtgacaaaccttggcaatgcactggttacaaatgggctaattaagaatctgcactttcttctagcatcgaagttcagaaacagaccatcgaagatgagcctgaatttgaagtcttgtggttgtatcaaggctctcttttaaaaaatactagttattttatctgcttgtataatgggttgaattgtgttccctcaattccctatgttgaaatcttaacccgcagtatctaagaatgtgaccttttttggagataagatcctaaatgaggtaatcaagttatagtaaggttatggggtaggtattccaacctgaccaatgtccttatgcaaaagaggcatttggacacagagactgacacacacagagagatgatgatgagaagagacacgaggagatgatggctatctgtaagccagggagagcccccaggacagatccctccctcacagccctgagaaggaacgaaacctgccaccatgacactctgatttcagacttccagcctccagaactgcgagacaataaactgttgttgtttaagccacctaatccgtggtactttgttacagcagccctagaaaactattacagcttggattaggttataatgttctttgctgaagctgaaatcttaatttataacccaacccatctttccattaaggcaaataattcagtgagacctaaaactaaaatctgttcagttgaaggaatttctcaccaataccaatttacttttcaaaataaccactgccaaaaagtaattttgtaagaagaaaatcatcagcagtttctcacctggatttgcaaggcggctacttgttggtccaagaatctgataaggatctacagcaaaaagaaacaaagtcaaatcctagacatagttgtaacatagtatgatgtgacttcagacataatgcctgacttaattgttttttcagatttcagagccgaaaatgtcctccaactccaaatcaactgcctccacctcctctatgagagaagatgtcacacggcatctcagatgtcttgctaggggactcctaattggtggcagggcttggattcaaccccaggatcctgacatatagctcaaggctcacaccaaccaatgatataaagagggcaaacatgtgccaagccccatcaatccagggccgtgcaggctgtgttgtttaggcatggaaagtaaaatctaaaaaattaatggatcacaaagaagcagcctgtgtgcacgtagaatttttttccctatttattgcatagttggggacgtgttttagcaccatctcaagtcacctcgcatgagtaggctgatgacttgggccctatcttatgtatggagctgtcgaaaagaggcaaacaatcatgttaatttccattaaaaagtgaagcattttagaaatgtgctgctgagcctgaatcttctcttatggttatccagacggcccctgaaacatacctaactgaggacgctggtcttcagttttgggcactgtggaaggagatggttgagcagctgaaaatccagaaatacaaaaggcaattagctataacagatttggtcactagtctttgatgttgttgcataatcattctatcagttaatttagttattaacataatagtctaactcagaagcatctcacggtaaggaaaaattttcctttctgatgaaatcaaatgtaaacactgtaacaaaaaaagaggacatttccaattatttaaaaaatggatacctcccactttttccaaaagtaaaaaaaaaaaagaatttggaatggcttaccaaacagattacaataaatcatagtctaagataaacacataaagggaaaccaccagtcaaataaagtaaagccagggatacttttaagcatggccaagattcaggaaaacaccgattatttaatgtgtactcaaacatcccatgaaacatgcatttgtgaaggttgacatacactacatcattcctttatttttgttatgaaagtcctgatgacccaaatggagaaagaatcactgcagtgaaagatcaattgtactcttgtcgtcaatggaacaaacccatcacatgttgcaaaatcacagattaaccacagaaattattatatactccatcaacagtcatccactgcctgtgacatgaaactcagggtcatgggagccaacactgtacctttcgactggggcgtggggtggccgtgaccggtccaggctgatctcctggggggctcatatggtaaatctgtaaagacaaataaattgactaaaagatcaatcatgtaatttttataagagatgctttggttttttatttgattttgtatttattagaataaactttgtgcaaaaaaatctggtaatccaaagaaatatcccactagatttgagttttatttacaaattaaaatttcatatattatagtggtctaaaattctcacccgtttgtctgaaaacttccattggcagattctcccagagctttccaactcttctaatttcctacaaccataagtcaagaccccaataaaagtttcttacaatctagttcatcctgcttccactgggactgatctacatctgtctctttattatcttcatgactcatccaaagcagagtctacaacttggatgaaccagcccatttttgtttgaggtctgttcctaaatcaatcaaatgacattcagcttctttttcttcttgcatctcctgggaagtgatcgctgccttatctttttatttgccagctgcctctcttagccaactcccattttccctttataatctcatcaatttatattaaatcagtcttatctgatctagtgattttcataggcaaatgtctcccatttctaatgttctaaataaatttagaatttctctaaaatgacctgcatgaaatgaattacaggactgaaatagtattgctcccacagcccattaatgatgaccttctgagcttaagcatatgccaaacatttctttgtatttataaagtcgtatcacttgtcctataaaccttcatttacttttcatatgcaaatttaataactatacttctgcatcctcagtgtgagttctattaatgattatcaaagctctatgtcatttcaagtttgtttcaaaaatatattacagaaaccttattataatactcttgctaagagtgcatagctaaggctatttctacatgcaatcttattacataactgtttcaaaattatgtcttcttggattgcttggtctcagttcaatgtcatgtgtcattctgggccaagtgaaggccatggccaaatatctcagcaggtactttgctgccagacaccaggagatgtgtacaaaatttcacttggagggtaggacaatgcaattgtttttaagcttctctttaaacaaatattttaattttgtttaaaaccagcaatttgatgggtcaatcttcaaagagcttgactgtgttgcagaagatgtgtctcttcctattttcatatcccaaagagaatagaaatgatgcgcaacgtgaaagtcaacacagaatctccttaatgtatttggtctgtttggctgcaagcatctttgctactagtgtggtctatgaaatcctacccttcagagctttggagaattagataatttttctttttaaactgatgttactcctctctctcagctggcatttttgcatttttggacgtaaatcttttcccacccagatcctcagattttcacatctcttgtgttggggttacacataggaattatatctgcagcccctaacaatttacaactgaacttcaacttaagtctctgggaacactctgcacatgggttctcagtcagttgcattttgtctaaaataaactggacagccagagtttcaatttgcaaattgtctcagaaagaaaaacctactcacaaggcaatcctagccacatctaacctaatttaggagcagaaaagcacattaactaaggccttctatttaccaaatgaaaaaaagcaagataatacagaaatacagaaatatgttctagatctctgtttctcaaagggtggtctgtggaccagcaacatcaacaatacctggtagcttgctagaaatgcagaatcttaccccagacctactgcatcaaaatcagcattttgtttattatctttttttttttttggaggtggagtctcgctctgtcccccaggctggagtgcagtggcgcgatctcggctcactgcaagctccacctcccaggttcacaccattctcctgcctcagcctcctgagtagctgggactacaggtgcctgccaccatgcctggctaatttttcgtatttttagtagagacagggtctcatgctgttagccaggatggtctcgctctcctgaccccgtgatccgcccgcctcagcctcctaaagtgctgggattacaggcgtgagccaccgcgcctggcctcagaatcagcattttaacaagatcctgggtgactctggtgcacactgaagtctgagaaagcctgctctagaccattgctcttttcaggaactctgttcctgcagatgatttcagaaatgctatctagagtgtgcaaagacaaactaaaaaatggttgaaagagttctagatggattgcttttacccatggcataagtatgctaatggaatgaatagacagcatcagtaggttagtcagatactaccttaaacataaaattgttgctcatgaaatgtgactgggaaaaaaaataaatgccgaactactattcccaaaatattttgaaactctttattcacaaaatccttcatatggtgtataaccatatcccatcctccctcgaaaataagtcgaaacttaacaccaaacagtctacttttcagccaagtatttgagacagttatatgaacaatgattcacatgttcataaacatattgccgcggaagataagtgggcttttgttttcttccatgacattctggtccaatgcttccttatcggctaccgatcacatgctgtgggcactaagtatccccctgtgggatatgacattgggaaacattcaactcaggctcactgagatgggggacagccaggggtgacttctttggcagctacaccatctcaaaaccttcgtagttctgctcttgactgcttgaaaaatcactcctctatgtatctttgctatgtgtcctttattgataatagagcatcagacttccaataagaatatattttacatttaattttcgctgatcatttcaacaccctctccatttctctttgactttgatcttcaaggcaatgaactcatatgcttggcagaagtgcccatgtaagggaaggctgctttctggcactggttctgttgttttatctgtaagagactgtgtttaaaaactgagctttatagaagtcattgcataggcagcttgggtgaacacagatgtacattacatcacaacagtataaaaaacagcatgaagctacaaatagggactcggctagtgctgaccactacacaccagcaactgtgtcgatttcctgggagctgggatcagcttctcattctgaatgagactcctcctccaccacacccttttgaagacatcactaaattaatacaacattctggctaccctttcctggagggctaagttcagccaagttttacattctcccttcatcaaactcactgaggaggaacgctctagctcttgccccacacaccccacaccgccaccccgctgcctacccgctttattttttaaagggcaagaatgtggatcgtggaagagctcatcctcattctgcaggatccacaccatatctgcaaagcaactctggaggttccctggctgggctggatgggaacagatgagatttgcctgctcttgaaattagatgctaatggggaacacaaattaggaagagcaagagctgctgctaagaaccaatctagaagtgtctgtgaaatgaaaaaaaaagtttgagtcaaccttaacataattaagttgctctctattttcctccagatcttcttaaaattctacatcaaagtttgagcatggagttttggaaacattttgcattcccttcttgcctaggtttgcatatccctgtggttatataagaactaagcggaagcaaagaatgcaattttagccatttgctaagatacaggctttacataacacctaactgagagatgctatgcagtagttgtattgtctcactatgcctagctgtgctgaaaagcactaggctgtgagctccaatggaggaataatttaagattccaagaaacccctgaagagcagcagcttcaaagtagaagcaaaggctgcatttgcaggcttaactctctaatctcttttgataacaccccagaggcatatcataatatatgggttgtcatggggatggaagaggaaaggatggggttgcagaacatcatccttgggatagaactgagcttttgcatgacctgctcctaagaggacaggcagggtggtgcactgtgtagttaataggggcttgcaagattctgtggatctgtttttgccactttttcccctgagacctcaaagggctatggctccaaaagaagtggattcagcaaaaaagaagggtgtttgtagaggaggtacagaaagggattctggtcgtagtaactgcaacaacgtgagaaacacgtgaaacatcataaaataaagtataataaaatatatatatatttaaaaaatcataaaaccacagaatgtaaaatgatatgcctatgggttgatactttatgagagtagagaagactgtctcaatgctaattcaacaaaggggttgtgaaagaaggtaaatcttgaatcaggaaaacgtgggaaaatactaggtacgggcatgcaaggaaaagggatgaggtttggacaaatggcaggtagtggtggtggcagggcatgttcacatgtggtcccctgtgaggtcagtgaacggcctcggccaattgtgcagggagactgaactgacacagcagcagcgagactgacctgacagggaagcagtcagggggctctggaataaatgatccacttgggaaggtgggccatgaacagaagaaaaggtagattgggggctgggcatggtggttcacgcctgtaatcccagcactttgggaggcagaggtgggcggatcacgaggtcaagagatcaagaccatcctgaccaatatggtgaaaccctatctctactaaaaatacaaaaattagctgggcatgatggcatgcgcctgtagccccagctactcgggaggctgaggcagaagaatcacttgaactcgggaggcagaggttgtggtgagccgagattgcaccactgcacttcagcctggcaacagagtgagactccatctcaaaaaaaaaaaaaaaaaaaaaagaagagaaaagaagataaaagaaaagaaaaggtaggttggggcagtaacccagggatgggtgactcacagtgggaagggaaggagggaagggtggtgaggaagtgctgggaaggtggatgcagcaggacaacacacatgtgtaggagtctctgcagaaagggtgcggaatgctgtctaatttaaccagtaaaccctgaacaccactgtctcctctatcagggactctataatgaaacggccaccatgcagagaagagacagattctggtctaagtagagttgttacctaggagcctggcttgcttcatggtcagcacaataacgctgaccagagttcggttccctcggatgtgggattagacaaagggtatggaaatgaagatcatggcacagcaaaccaagagtggaggagacagggatttgggtctgtatccccaaggaccttcaaagaaacagtcaacaatcacctttctgaaagtagtcaggtacccactgaccacagggatatcgtcagattcccagtgacctccctctggagctcgttcagctctgaaagttagtgatgcaaaagctcttccccctcagccatcacgacgttcattctccagttgcaggttcacagcttttatctccacaggagcagtcctttaaggttgatcgcttagcaatggatgacccgaggtgtataactagttcttatctccaagttcaagtccctgaatagggcctacagtaaatagtcctctggcttgttcagtctgctttaaattctttacaggtcagataccaatatttgtattggttctcataatcacagtagcagtggtcaaaacaggttatttcaggtacaaactgagtcgcgaaaacatacttgactagtagtggagctgtggaagtgtgctctctcccaggtcacgctcaaattatgggcccatggaagaccaccatcagagcggcatgggaggtgtctgagtttgccacccttgccttccctgggttgggcagagagggagtcccaaccaacatcctcacagtcaccctcttctccatccacctggatgggccataccttccaaatccaccatatcctaaaatgtgaaaacaaagcagctccaggacccactgtcttaaccaggtagcatcagtcagctggcttgtctgacagagagattgtgccaatgaatttggccagtgttgtgatcttttaacacagtttataatactagctcacaacccctggctttgcaactcagtcagaggcacctatgagatgtcttaacataaacaaacaaatacaaaattaaaaagtaaaaaaatttttaaaaccctagccaaatgttttggaaatagtttttatttttttagtttatatggaaatattttttaaatgctcacagaattacaaaatctctaaagcttgagtcaaacatgaatttctattttccactcgcaatacacgtggtggatgtctttaggaccaatcttgcagactctaggcactgggtcttgcccatgtttcaatggcctgtgaaatcttttacatgacagagatgacttactacctcttagtaccccttagctgctaagcctttccatcatgcttcccaggagcaagacagtaaactttttctctgacgttagagaagagaaaattgccagcctgaagtcactaggcagtaaccagggcagtgtcagtatttgaacagcctgagaagcttcctcattcattctctttagctccctgggcccccagtctttctcattagaaagaaagagtagttgccaagcctagatcttgaaccagttcgaactgagacttgtgtattccggatatgtgatagagtttaacatgaattctggaagcatgtatgaatatggagaaaccatcccaccaccctgaacacaatgtcatcagctgtgaggctggtacaatgatacctagcttatcgggctgatgtaagtcccagggagaggacaaatgctaaaggcaagctatacccttctgggaaatgccctctctccctgctcattattcgtctggcaaacatctaattcccctttgccatgtggccattcctctggaaagcatctttatgcctttcatgggggattgagttcctccccacccctgctcctacgccctgtattgctagaagtggttcctctaccataaaatctatcacattagggaaaacatttatgtgtacatatgtgtctctctggctctaggtcactctactgaaacatctagaactggaggcaaaacatttcggtttgttcaccatcataccatccgtggctggcacagaggaggcactcagcaaatgaacaaaccaagctgaatgaagaagtaaactttctgaagacaggaagcttactgaagcctggttcatctatatattcccagagtctaacaccacgcttggcactaatgggcacttgatagatgtttatttttgcatgaatggcatgtaaatttattacctaattaaatcatttggaggacaggcagtaagattcagatgtaaatactactggttgcatgcttctgctctgcaagactggcttcttgtgacatactgataatcggtcactgtgaatctggggagtgtccttgttttgtgctcttcccccgaggagggacagatccttctgttagttcaaaagtcggcctattcctaactgccaggcatccaggatgccttctttgcccatctgtctttctgaaaagctagttaaagggctaatctgctcttaattcctttagtgtggtctttgaatgaaatggtttgagtggatttagtctccaaatcaacagaggcagaataagactgtctgggactggcttcagctccgggatcagctctctttgtatcacgtgacttagggcacggatctcagcaggacatctgggatgtctctcaatgaagagatcacacaggggtgttttcgtacctggcctagttgtaattctttgcgtagcttcaggatatactgaagtatttgggaaaataaaagctgcaccccctgcagacaaaaggaaagacaaacatgtgaaggtcttttgttgtggttgtcgatctcaacatcagcgccaaatctacttttccctatgacaacaaagggaagagacctcctcaaacctgccttaacagagctccggagaaacagacaggtgcacctgtcagattctcaagatggaagtgaaacttggagccttggtgtactcctgtgccccgtttgctataaagcgttttgtgttttgattttataacttcttgatgaagccctatctgtgtccccctcaatcccacttcccactgggcaatctcgttttattaaaaaattatatggtacatgttttatttttcaacttgtataaaaacccataatatattttacagagcttttggaaagtagtatcaagcaattataagtatttagcctaagagtatatggattttattaataattaatccacatctctattcaaatgcattttccctctctctcttttgaccaaaactcatgctgttagctgagaaaattcccttttcatagttcagtccatttggaatttgttgtcttgttcattggtttcttccgtgtttaacaatagcaaaatttaatatatttggagcttttttgaaactttcactcaatggttaaagaactcataaataaatgtgaaattatcagaaaatgtgcatagctcaaaggtgtttcctaagaaggggaagtaacttcctctaagttatctgttatttctggccacaaggtcactaataggctgatgtgtgcaaccaaaattattgaaaaagtgtactaccaactcgaagcaggttttttaaaacttcagattaaaaagacaatgtgttgaatatagaagaccatgataaatgagcaatttcattgtaatactcaaaccgggactcactcacattttatattttaaaataaaatggtaaatattgggaaaattgcgtatttctatgtgagggctgatcgtgagttaactggctgacttgcaaggctttctggcacttcccgtctccctccctagcccgagtgattgtggagggtccctgcagctaacagagtggggtgagcagccggtggccatgcttccggaactctctccatcaggaaggagcagatggatgtgaaccaggaacacattcatccacagaaaacccagcctctgctgtgagcggggggcgagggaggaaggttagccaggatgaggcacggtgttaaaccctacttaggctcaggcaaaataaatacataactaagtcaaatgtagaggcaacggttagagatagaaaacaggcatttggttagtgactaatttcatattctccaaaattatagcagaggttccctctgaacaaaagctctcaaaatgttacagaaattccctcctgccttttgcaaacatacaaagtctgtaggaaaacaaatcaaatagcctaaaagtttattggaaaggaaaaagaaaattccaacttatcctagcaaatatttctttaagaataaaaatggaaaaaattaaaggaggttgctaagggcccttttatatcgaacatgcttttagtgtctacagagtcagcacagcgaatatattgggaccaacagaagaagactgtaatccggcaaatgtgagctaagttatggctaaaggcaaattctgcacgtctcctggttaaaaaggaaccctttgataatcaaagtggggtgcttgggaagcgctcagaaaaccaaagggcttcaccttcctttaggctgtggtacattcctaagtatccgaaagtattctgaatcatctacctgcgttctgtcttcctggcacgcgctgactggtttcccatgaaagcatgcaacctgtacgtaagaccctacgctcttgctgggaggcaggggcggggccagcattacctgtgtttctagcatgcattaaccgtggagagttttgtaaggctttatcaacatcatctgaagtcaaatgtggaagaggagctacaaaacaaaacaaaaagcgacatcaaaatgaaaaaaaaaagagagagagagaaagagaattacctttcttacaaaaaaaaaaaaaaaaaaagaaagaaaaagaaagaaagaaaaccgttcccccactcccacactaacatcatgggaagcttataactatttccagcaacctgctacttgttagcatgttaaaacctacatgggggcccgtctttaattcagggaagaagtggttgggatgccaggcaaagcaatggaggagaatttatccacctcactgtctgtcacactacttccttctcaccatgctggacgttgtagaaattaaagcatgcagcaaacattctggattcatgccaacatgccatccctttctgtcaggttaagccgaatcacatgatacaaagtgaaaacttcccttgttctgtgctcaggttagaatataaagtggggcttcatgtagctttagggagaataatccccctaattcctacgaaagagaagccttaatgattctatttcgattcggggtatcatggagacttaactaatgtgtgaccagttaacgcttcctttcccctttgacattccatcttcttggtcgcaggaccctggaggaggcagctgagtgttgaagtgaattttggcttctcctgagagcgctgactacttctcatcaggtgatgtggccagggtgttgctcccctaagtcatcacataccaagcatgtggctccctcggatccccagtgggaactgggcgagggcaggaggatgctgtcgacacacctggttgaaccctctgaagctcaggtcataagaaccatagccacagccatctatccttggaggaagggggagcttactctctctgaggtagtggagatgtgagagaaggatgtcggcgttgtagctgggggtgagcctctggaagtcgtccttggtcatcttgcacagttccttcccatcgatgttctggaataacaagatgttgacgtctggaaggccatattctttcaccgcccactccagccactgccgcacatggtctgtactccatagcgtaggatctgaaaggggtgggaacacattcagtcaattcctgaagccagggatcttcatcttggggtagatccccatccacgtgggatttctgaccagctgccttccacaagcacagcctccagccagcctccctggctacccaggagaacattttgggggaaagacaaaagctgcctcacatccatagatcattgtctttaaagtgaatagttctggaatcttgggattattcacatcacatgcccttgtttttgctcaatctaaagtttcctgtaggcataagattttaaaaattcttttttctcatttatgttcaattttatttatttattttaaaatgagtaagaataagaggaaacttcttttccttagaaaactactggtatatttatatatatttatatggaaataagagtaagccacacatatcaggaaggtgctaattacagatcacaacaacaacaaaaataataataacagtatttatgcaaaatactgaaaaatactgaccacagaatcggaaatgaaatatagatacaccaagactctagcccctcctatgagccagcgttcctcatagagagctgtcagttccagacttttcctgcagggtgtttggttttgcaattaaccagcacctgcaggagtggggttggtgagtggtttttgcattccacagctggccatggcgagcacaaacaccccacaggatgcaggccacgtcgtcacactccagtgctacctatgggacagggagagcagggcccgggggagaaggagcaggtgatctccaacagaaacgccagccgggatgtcctgtggtaaacaccctcagtggtagggtcttcagagtgtggtaaatggggcggctgctcccttgggccccgagccctgagagacacatgggcagggagttggagccctgagttctaatctcaccatttctccactttctggaccttgctgtgggcagctatttctcctttctgtgtctgtcccacctgtaaactaagagcactgatctcagttcccgggacaagcccttaggggtcaggcatgccaggatgttccagtcctcttgaatgaaagtcaggtgtgggagtcacattttagctaatactttcagatccttgtttgtttggtcccactaatattttaggctactcaagaatggagcatgtagtatgctgctgcaatacatttttaggtttgcagaggtaaaccgtaataatagtgagaaacagccagccagtcatacacccagagttctcttcctctccctccttccctcttccttccttcgcttctccctccctttcttcccttcagctacatagaagaaagaaattattgcaggtccagtagaatctacctttcccattccattctcctactgcaaacacctatcctgaagttagtagctagtggttagaagtaaccactatcctgaagttagtacgtgtatcactcctatacatattttaatatttttaccatttaaactacatatattgttttgtgtttttaaagttaacataaacgatatatgatttgctattggcactcaatgttataatttcaagatgtagccaaatgaattcacaaagatatactcaatcattaagcagctcttaggcctcccccatgtgaataatctcaatttatttagtgaatgtcccctgtccatctccatgcatacgcgtgaatgagtccgcattggtccagggcctggggtcctttctggaatcatctggggagactgaaaaactagtgatgcctggtctcccctgggagagtctgcttcaattaggctggagggcagttgggcatcacagttgataacagctcccccaggtgactctaatgagcagccaaggttcagatcatcttccctgggcctcactattccaagcgtggtcctccaaccgcggaagcatcagcatcacctgggagctaattagaaatgctgagtctcaggccccacccagacctgctgaaccagaatctacattttcacatgaaacctggggacacgctggccttggctgagtacctagatacgggatttctgagttacagggcacatccatcttcaacttgaccagctagcattggatgtctaccaatatttaaacacccacattctcacttaaaaatcagtgcacaggccaggcgcggtggctcacgcctgtaatcccagcactttgggaggccgaggcgggtggatcacgaggtcaggagatcgagaccatcctggctaacacagtgaaaccttgtctctactaaaaatacaaaaaaaaattagtcgggcatggtggcgggtgcctgtagtctcagctacttgggaggctgaggcaggaaaatggcatgaacccgggaggtggagcttgcagtgagccaagatcaggccactgcactccagcctgagcgacagagcgagactccatctcaaaaaaaaaaaaaaaaaaaaatcatcagtgcgcagaacctgaaaactaaagggaactctggttttgctacagagagaatatcaacaaaaactccaacggcagtgatgacagaaaagtgtacatatttatttgtcatccaaacacttggaaacatgttgttagtctgtgaaaactgaatgtagatatggaaggttaatgttatccagttcactgaagttcagatgactcttcgtcattggctgagaatttggctttcagagataaaatgtttcttttttcatgacatgtcagaattcctctttctacaaaaatggatcatactgaggtcttagggcaagttctctttacctttggttctgtgcagaggatagtttgttcagccctcacagagagaagaccccccatcctacccaagtcattccctgtaagttccatcctttgatgttagcgaaacccacctttttgttttgttttgctttgcttttaacaaaatgggaggactattttttttttaatgtaacaactgtacttcctagaaataagttcattctgggaacagactttcttctctaaatggtggaaccggatattctcaaaatgacacataaacatattgtctgaaagccactaggttcgtgttaaaatggtgaaaggagaagtttaatctctctattatcccttggtgtgccccttaattggtttcgctcatcaagacaagggttatcctggcccattcagttttcctttaagggaatcaggtgcaagaccccagagacaaagtcctcaacctgtattgtacttatctctacaagtctcactttgagttggtaaaaggctgttctggagttccggagttctgccaatatgagtataaattactacagcctttctgatgaacaacacaataatacaacaatacaacacaacaatacaatcaaacgtctttaaatatgtgcagattccctggcttaaaaattccatttctagaaatttatcctaaggaaataatagaggatgtgcgcaatgatttattgtcaaggatgttctttgtagtgttgtttataatagcaaaacattggaaacaccctaaatgtccagcaaaagagaagcagttttgtaatgcatttaggaatgttcctgtgatatttagagactaaaaattacactgttgaaatatatttattgatatgataaaatgttcaaagtagattgcattttaaagtttcaaaatattattatgatatcattgtattttgcaaagatatataaatatctgcacagaaagaaattcagagggagatacagcaaaacgtgaactgttgtcactgagggaaaggagatggggaattttagatttgtcattttcactaaactatattttctcatttttctataataaatatggaatacttgggttacaaattatttatacaaaatgtattctctatttttcaaagccaaaacatggtcttacaaaaggtatatatatatttaatgtatattatatgtatactatatatcacctatatataatatatgtgaaagtatttttataaaatactttaaatactttataaaaagtattttttaaaagtataaaaaataaaagtaaaaaaacaaaaagaaaagttaaaaaaatgaaactatgcaaagcattttataaaaagtataaaaaataaaactactaaaatactttataaaaatatttttataaaataataaaatatataatatatatagaatatatacttacatatatgctatatatactacctatatatagtatatatgtgaaagtatttttataaaattgctgtcaagagtataaaaagttaagtttcagtttcttttatattttgttaatatagactgcttcatctgaaaagagtaaaattacatgaagtcagaacactcccacatccttttagcatttgatctccacacctctgccctataaatttctaagcaaacaatggtgaaaacaaaacatggccactcggtagaagaaatgagggcattccttttctcctgagcactcgcaccactctcccagacccactccggaggtgttgcaatagaggacagtttgcaggggaaaaacccagattccccagcatgaagcacacagtcctttgttccatgggtgtcattcccaaccattccccctccaccctacatttcctgagccaatgcctccatgcctgtgccacatgccacccacagcgtgaaggactagcaccttcttgtgccctcacctacactcacgacctcctttgggcatctgtcctagatgttctcacagaggaaacacttaacaaatctctgggcagtgaagtgataacaagactgaagacctagtctctgctcacactgaactccacctccactactttggccaggcaatgatgctgcagctgtagatgatggtttttagagttcaggtcagtgcactgggtccaggctgtcaggttttggtcctaaccttttaactccatgaagagccccagtagtctctctagtctcctccacactccatggtatctcagcaaagctttatggcttctgtcacaccaggaatcaaagaaaggggctcatgagttcctatgagattcagcaggcctgtcttcctcctttcttgaccccaaccacacatgtgtaggaggaaggggaggggactacagcataagccccagccgaggcatcacctttgcctatgtttaggtgcgaccttctgccctaggtaggaacacctcttgtctccaggtagcagtgtgtttggaacctgtcatttaattttataactggacctcatttttctcttctgtaaaacaatgtggagaatttcaggacctgagaaatgactcgaataggataagaactaagatagatttaattcaagtaaaagtcattaagcattatgcatatggctatatgcaccagtactatggagattccaaagtgtccaagaccaagagaaacactaaggacccactgagagaggcagcttatgaccacaaccacaaagcagaactaagtctctgtgatcaggctgggcgtggtggctcatacctgtaatcccagcactttgggaggccaaggcgggtggatcacctgaggtgaagggtttgagaccagcctgaccaacatggagaaacctcatctctactaaaaatacaaaattagccgggtgtggtggcgcatgcctgtaatgccagctactcaggaggctgaggcaggagaattgcttgaatccaggaggcagaggttgcgataagccgagattgcgccattgcactccagaagcctgggcaacaagagcgaaactccgtctcataaaaaaaaaaaaaaaaaaaaaaagactccgtgatccaaggaggaagtggaagtgcagagaggtagcaccaaccaggaaaaatgggaaaggcttaccaggagagtgaacttggattaacagcgaggattttgacagaagtagagagaagctctttggtttaggggaaccacttagcccagcctcatccgacatgggcatgaaatatctgacatgtttaagaaaaagggagaaatttggtgtggctgcagtggaggatttcagagagagcacagcaacatacgaggatggggatgaaagctgggctcagatcaacaaggtccttgagtcttgctaacaaggttggattttcatttttagagatttcagagtaattgaaaatttctaagaaatttttaaaaatcttaaataacaccaatcacagaaaacttggtgatgaaaataaaaggctttattgggaatccaaatacccacattgggattcttattcaaccatttactggacgtaaacgtcaacctctctggaatttgttttatatttttctgtgggtaattaaatgaaatgttaggggaatagaaaagtaaatgagataatggatgtgaaagcactttgccaacaataacatactgcaaaaaaagaatgcatccacacactcgattttgcattgcaaactctgctaaaatggaataagaacaaaatctgttatcacaggggcagcctcctccttaagacacaaaagtccaatttataattttattttaagaaacttttggagatgcttctgtcagatgaatcataagccattgaagataagttgttcattttcagccttccattccaattgttttgaaaacatctgtgtcatcattctacatgtcatggacaccaaaatggtaaactgtcatggcacaggctaaacagaagccatcactctctgaagcctcttatttgtatcttaagttacatggttattatgaaatctactttggtaaattggaatttaaaaaacaaataaaagtaaaccattacacacagagttctggagttgtactgttaatgtactctgtatgtggagtgggagtgggggtataagcagtgggagggagggaggaaggctgacatttaaaaaaaatatttccatgaaacaggattctgacctagtagagttcccctgttgccaggaaaatattgagtagatatttaaatcaggcaaaggggcactgcatcgccaaagacaaactgtgcctttgtgaaacaaaatgcctcacacaggcaaacatcttctttcagaggcccctctagagaaatgaataaagtaagattaaataaaagccaaactggtgataatgaaagtcctgaatgttatttttcttaaataatatcaacgtaaaatattggcttcccaaaagaaaaaaattactcttggttatgaaaaaaacatcaaaaaataaaaactaaaatgtacctctaagccatatcacaagcctagtgaggtgtttgtttataaatccaggccctgggcaagtcagccaatctgctgtccaagacactcataagcctgcaaaaataagatttaacatcttgcatcctcaggaggacagaagttacatttataaagcaggcccaatagagagaactggcttaaatttgagcaatgattcactccatcacaaatggaaatttgatctcaaataaagagcctacctcaagactgtttctgagccttttaaatttctaacttatatgtagagttcatttattgttttggtattgatttctaattttattgcacgttggccagtgaatagagtctgtatgaaattaacattttattttattttatttttttgagatagtgtctcgctctgtcacctaggctggagagcagtggcatgatctgggctcactgcaacctctgcctcccaggttcaactgcctcagcctcccgaataggtgggattacaggcacccaccaccatcgtggctaatttttgtatttttaatagagatggggtttcaccatgttgtccaggctgatctggaactcctgaccttaggtgatccacccacctcggcctcccaaagtgctgggattgcaggcgtgagccaccatgcccagctgaaattagctttttaaaaagttccggtttgttactcttttggcggcctagtgcatggtcagtttttataaatgttccttgattgcttaagaaatgcatattctctaatttgggagtacagagttctagaaaaaaaactcttggtaaggtgtatttaattttaatgtcactgacctatcaattactgagaaatgcaaattaaaatatctcactaaattggacttgactatttctttttgcagttcattacatatttcaaggctatgttattaggtacatgtaagtttatcattattatatatttgtcatgaatttagccttttttcactatgtaatgaccctcaattatctccagttatgctttctgcctgaaagtatatttagtctgctttctatttctatttttgtcagctttttaaaaattcaattttcactagcgtatcttattctgtcaactctcaatctttgtttgtgcaagatttttttgtaaacaacccataactgattgtggagtattttttagtctagtctatcactctctgtctttaatggcaaatttggtctatctacacttattatcactgatctatctgatttttaccatcttattttgtgctttatgttaaactttcttagtccattctctatttctccttgccaagtgtctaatcagattgatctacttttcttcattcacttttttttctttgtttctgtattggttttgctctttgacattctagttctctttcctgttaatctttaaacaaaatctaagtttaattaccagtaatttagaaagcttatacttgaatcatccatctctgattttacatgacaatgttccctcatatttttactccactgaattttctactccctacttagggaggctgtggttgtcattttacagccatttctttctagatctaccctcaccttaatcaatttcattgctcccatttccttcctgtatctcactcccttcttctaggatccattttttaaattaaatcttttgttattatctgaagtgaggttcaattagcaacaaactctctttttaactccttcttttatgttcttccttaatatttaaaaagtttatttattttatactctttatccaatactttaattatttaaccttctgcttaatcatgttcattgtttctgttaaatcttggttgggggagatctctcttcagctatttttttgtaatttgcgggtggcagagtcatctttagcgggtctctatctgcaggaattctgtacagcgtaggttgaagacatgtctctccatgaagatttcgtatttacttctgccaggtttcccagattatcactagcccatgaccatttttctgtattaatttctcagccttagagttcctggcacacactgttgtgtgtatggggtggggactcgggtaatgacaggctcagttccaattctctgctttgtggaagctcaagatttcattccttgcccctagttgacctttaaaacccaaatctctgcattatagcaacctaggacaaccaggtgtcaacataagaatgtgctgctctgctctattctcacttttttccttattttagtccctaaggagttcattgcctttcttcccagttcagctgtgcatttaaaaggatgttaaactccatgcagcaattccaggtgttttgcaaaaggaatgtttctcaggtccttttatagtaacctctctattttactagaaccaagagccctctctgcatactttttacctatttactttgaatagttttcatttttaatgcagccatcatcctaactcatgttatgctttacttcattcatttattaattaatcaattgtcaaaaattacttatatgaattgtataatcctctatgaaagattcaaaaatggcaagaaagagtgcctgtcctctacttgtttgagaatctacaattctgtgtattttatttaaaaatacatgactaaattatttttgttaggctctaaacatagctttgtcattctgacacactgatttatttctctggatgaaaccattctcaagtaatcatcttgtttttggataatgatcgttattgttctttgttttcttttgttgttgttgcctcctgttattccatgacaacattgtgtgtgctcatcatgttttagaaatgcaatggcttgttccacataaaggtttctccctgcctgggttttctttctttgtcttctctttaaatgttgctatccccagagtttcatccttggtctacccctctcctctctccatatgtatctttgggcattcttatttgctctcatgtttgaactataacatgcatgctgtattattttcctagggctgccgtaaccaagtaccacaaaatgtgtggcttagaaacaacagaaattcatcgtctcatagttctggaggatcaaagtctgaaatcaaggtatcagcaaggccttgctccatccgagactgtggataaaatctgtccttggctcttctagcttctggtgctgtccagcaattgaatgttccattgcttgcagttgcatcagtccaacctctgcctgtcttcacatggagttctccctctgtgtttccatatcatcttccctctgtgtgtgtctatgtccaaatttctcctttgtgtaaggacaccagtcattttattaggctcaccctaatgacctcatcttaacttgattaaatctgcaaaacctctatttccacataaggtcacattctaaggaactgggggttaggacttcagcatatcttgtgagggaggcacaattttttaacctgtaacaggcagctgtttctgccagtctatatcttgagtccccagggcactctcacagatgccagacccaaatataaacagaagaactgcactttttatcccaggtactgtttaagcatgtcacacatattgctatatttaatccatatagcaccacatgaagtaggaattattatcatccatattttggtgatgaaaaacctgagaaacagcaagattaagtagcttcccagatcccacagttagtacatggcagagtttagaactcaagtgctgtgactcccgatcaaggactttccatcctgagctctaggcccaccacactgcctgacaggtgtcccagaagcatcttaaacacaggatgaaccaaactgaaatcacctattttaaacattttttttttgtatattcattaacacctacccagctgctcatgctaaatctaagctgtcttcaattccattcttctctttgactttcaagaaaaacagataacatcattagcactgtagaaatgtaaaaattagccctgggcaacacagtagattattttacaaaattccctctccacctcctttgtttacttaagtcttatttgaaaaggctgttgcagaatgtctacaacaatttaacaaacacattctctcatcccattcctgtgttctcccctgggtatttttgtcagcacagcttaggaagaagaacccagactgtggagtcagaaagaactgggttcgaatcctggctcttcaaatgattggctgtgacatatttggcaactctcttagcgttcctagttttagtttctttactgtcgagtgagaatgataatgagtacctacatcatagggtggtcgcatgatttaaatgagataatgccttttctacaaagtgcatgtccaagtgcctgacaacagtgcatatcaatagatagtagctgtcgttgctttttagaaaaatgacttgattttagcctcacatttaacccaatggtggtttcctcaaccgctattcagctgataactttaaaatacacataataaactttgatgttagcatttctattttagtgggttttgttatttagttgtttgagcatagcaggaatttaaacagaagattaaagaagcatgtcccatcatatcgacagagtggaagagatcctcgggtgtgttcagggacgtaacaaagaaagatgaagacacaagtcatttcaccagcaggttctgggcctgagaataggctctggtctcacccagttgtgcaagtgttcccgggaaagtcatttcacctctctcagtcttggttttctcatgtttaaaggaagactgaacttagaccaccaagaatcctgcaacccctgcgagtctgcgattcctgctagttagatctagattactgttaacttgataaatcacatttactctcctccacacagaatccaagtgctggctgtgttgtctggcgattgagaacacaaaagacatgatcatcacctcactaaacttacaatctaatagaacagacaggcttataaataactcacgctaagaggattggaaacataatatatcagccatcagggcttggtcggagggtatgttctattacttgttattcactggctttcaaagcccagtgggggaatgtcaatatttagggaggatcatgtggaaactatgcagtcctctaacactctgagaactcaagatcccttctttacatgaaatcagactgccaaagactcatgctgggtgtctgtcctctacctgtgctgagctattctctaatgtaactcagcgctcacagaagatgtcacaagaaataagctgttgaaatgcagtgctgcaactgtggcaggaagacggtcgatggtcaggtctatggccccagtggccccaaaagggatccttcttttaggattctacactatgataaacattgccttccctgtgaaacttcttttttgaaaggaaaaattatttccccaaataactcttttcattttggctgccaggaagctcaaagccatactagaaacttaagtacagcatcttgggcaagcttgtggtcaaaatggctgcattcttccctcacatgctcttggcttctcatttgtatttttaactgccttagcactgattcctaatttccatttgataagtcaattgggtataagcccatcagtagtttagttcacacggcacctcaaatcctttgcagaatatccacatttaagtaagtatatacatgcatttgagaatacaatatgaaacaaaataaagtatgataacaaaataattggtaagatgtcataagaggagtgattaatttgccagaggatcaagcatggctcccttgacagggcagattttgaagatgtctggaagaatgagcaagagcattccagagagggaaccgcagggacaaggacaccgggtggtgaaaatgcagcgcgtgagttggggatgtggcagaggaaaacggcagaggctgcaaagggctttcgaaatcacatcatcgtgggtataaatgaagctgttcttgattcgtcctgtcatagcaatctccattcctcacatgctctgaaatactggtctgagtcattcatttgagctctcaatcacaccttctcctgtctgtcaaaaactacttaccccacatgggtgggtcttagctacttctgacagccttcggtcatctcctcagtgattaagagtaatgggaactccatgaacactttctaacggaatagaaaggtcctagcacaggggtctgagtaagacacaagtcatgtagcttcagccacacatgtttggtgggcaagaaaaggtgattttaaatctcattagagcttttattcacggtgaatggaacacagtaagagtttaatgaatgaattaataatgaagaaagtgaagagatacagtgaagagaagaatgtggctactcttatctctgagattactgattattgcaagggtctatgctgaaagtgaattattttaaaaatagaagcagaggcatttgaaaaactcaacactttagcacctattttaaggaattaaaacagaaaaagaggccaggcccggtggctcacgcctgtaatcccagcactttgggtgaccgaggtgggtggatcatctgaggtcaggagtttgagaccagccttgccaacatggtgaaaccccgtctctactacaaatacaaaaattagctggctgtggtggcaggcgcctgagatcccagctactcaggaggctgaggcaggagaattgcttgaacccaggagacagaggttgcagtaagccgtgaccgcgccattgcactccagcctgggcaacagagcgaggctccatctcaaaataaataaataaataaaaaataataataaaaaaacagaaaaagagaaatctttcaaaatgctataagctgctaaagcgagaggtcctattgcattttggtcagcattttgcaacttttaagaagtgaatggagcctgtgccttcctctttgttagccacttggttagcacatctccatgttcacagccaacacctaaagagtaacagtaactactgcaatgagtgattcttcatttttttttggaatgttaatgtgatactgttaatcatttctatctttcctttttgtctacttgccttttctaaaagtgataaaccatatctttattaaaaataattcaagtctattaaagtaaaatttatatcttctatctagattagaacttttcaaccttattgtacatgaaaattacatacacaataagcatgttaataatgtaaaatttccaaccccacacccaggtttggaacatttggaagtgtgtgtgtgtgtgtgtgtgtgtgtgtgtgtctgggaaagggtctcactctggcttcctggtgggagtgaagtggtgcaatcatggttcactgcagcctcaaacttctgggctcaaagaatcctcccgcctcagtctcccaagtagctgggactacaggaaccaccactacacctggctaatgttaaaattttttgtagaaatggggtcccactatgttgtccaggctggtcttgaactccttggcctcccaaagtgctgggattacaggtgtaagccactgtgactggcaggaaatgtgtatttttaatcataaattttccaggtaatcttgatacaagtggttctgaccatactttgaaaaacactttctaggccaggcgtggtggttcatgcctgtaatcccagcactttgggaggccgaggtgggcggatcacctgaggtcaggagtttgagaccagcctggcaaacatggcgaaaccccatctctactaaaaatacaaaaattagcctggcgtggtggcgggcgcctgtaatcccagctactcaggaggctgaggcaggagaatcacttgaacctgggaggcagaggttgcagtgagctgagatcctgccattgcaattcagtctggggaacaagagcgagactttgtctcaaaaaaaaaaaaaaaaaaaaaaagaaagaaagaaaaagaaaaacactttctagtcaacctccaaattaagctcggccaaaaaagagccatgtaaccagcatgggggatgtcacacttgtcaggcccctcttattacaactggtttcactgaatgacacttgggtttacgacagtgtaagagactgccctgccctatgagagatcctcctagatttacagatactcgcaccaaatacatagataaaaaccagagatgggaattatggcctaaccagtaccctttgggaaggcacaatcaacagtcttgccagaacaacaggcacaaaccagggctgcccagaatgcctggtggcgctactggttgaatgctttgctcatgactccccttatcttccttaggacaaacagaggaacacatcttcctccagactcagaattaatagctggaccatcttttcacatttgctttctttttatcctgtaggcactgaattatccctttcatactgcctgatgatacctcgaagccaaataacacctaccttttgcaattctgcaatatttaaatgttgcaattaaaaatacacatacacacacacacacgtgcgtgtaaacctcactcctggttttactctctctgttcaatttttactttagtccattctccacattcctttatttttaaaaagtggattctaccgtgctctttcatatgtatctatgtgagctttcttaaatctgttctgaaataggaggcagtgtaaatatatcaagtgacagtctacatttatccttcagggacattttctagttgacactttcttatgggcttttttttgacactttttttatgggcttctttattaactcaagatcatgagtatcaaaaccagggttgagggaatcgcttctcaaaagtgggttccaggtaccagaacccaatctgaacacggacaaagccccccagctcctctgtggttttatctctcagtctccgtacagtacaaatttcctcatcagtgtttattagggccactgctatctctagtgtgtaaacatcggcatgtattgatgatggtacaaatgtttaggaataactgatggtttttttttttttcactcagctatccgtgtgatttgcattagtgccaagcaatgtctctaagtagtaaggtctatgtgaaccactcaggaccaggtctggagaattctttttgcacacatggggtactccgtgccccaaatctgccttagtgaggtgcctggataccatggggatggatacagcagctggtacagctgcctgaggtcctgcaacctcatggccacattggaaaattgtccagattgtgcaatgaagctgtgtgtgtgtgtgcgtgtgtgtgtgtgtgtgttcatctctgtgtgtgtatgagcacacatacatgaagcttgaccaataactgaaagactcacaacttgcaaaatcagccacaactagctctcttacaaacactattaactgaataactgcctacactggcgtgaagcaactgaaggagggaagagctgaagagaagagtactttgctccaaagaaaggaaacagccttcacatcaaagcttactataagccaatttgcagagctatccttgcatccatccagctaatatttgatgagcagctactatgtataaaaaatcctgggtgctctgacttcagttgattctctgttctcttccccacacaaatatctctcttattttctaaatactttccttagtgtagaaagactcaagtctggccctactgaaaaggatatttatgacatcaaagcatattgatggcctcatggaaatacagcctcaccagttagaagatggtaccaggcattacctcttacatctgtgattcaatgaggaaccaagcaaggaatcttcagtgcaggccccctcagatggattctctcatctttgagatctaaacactttgttttgtctcctttgaagaaattacattcttaaggaggagggcaaagggtgagatgggttagggggcttcctttgggtgtctacttcactttgttcatgcccagagagtgtctgggcaacacaccactgccctcctgcctctcctccaggcacatcctagccttcgagtttttcttatgtgccacacatctggagtgggcacctgggacatttgtgtttctatttttcccatccaacaggaacagccccctgttctgaggcacagcagcaagtgaggcagtctcaggcattcaggtgcattgtcaagatcaaaccaaatgcatggcctctgtacctgtcaactgcctttcagtaaatactaaggacggttttctccctttcgtaatctaccatcagtgtctcctgtaagtcttaaaaaatgctttgaaatcaggcacaaccccaaaggatggtccctttcacaccccactgcatcgaaccagctttacgtgtttgctgaaagtcacatggtgacagatctaagctgaaacctgggattcaaatccaggccagatgttttgcaaagtaccctgcactcctgaactcttctgtctagaaggtgacagaagcccactgggcatgatccaactcaggtaaagggaaagtcacaccatggagggaatctaacctgtttgccatcacacttcgcagatattaatttaggtgaccccaggagcaagggagaattgagtttgtgcagatttcacccatgcatgcccttggctactttgccaacaaggagtaacttgtacagtgcagctcagtggtgaggtgtccgttcatccattctccacctcccttaatattcactgagcacctcccacttaccaggcactgcaactggccctggagatagggcctttgtggggcttatgttccattcagggaagaggataataagaaaactttttatttttttatttttattattttgagacggagtcttgctcttgtcgcccaggctggagtgcaatggcacaattttggctcactgcaacctctgcctctctggttcaagcgattctcctgcctcagcctcccaaagtgctgggattacaggtgtgagccaccatggctggccagtaagaaaacttttacataaacatgcaatataatggcagaagggaatgaatgaaatcaagaaaaatcaggccaacaggagactggcagtcacaggtggagacgagagcaattccagacggaagtgctcaggactggcctccctgaggccatgacattggcacggatacttggtgaaggaaaatgatatggaactacctggaattaagggtttcaggctgagctgacgccaaattcaaatccctgaggcaggaccgcagggtgaccagatggctgaaacaagtaacaggagggaacccacagaaattgctgtaagcagctgagatttaatccaatgccaacaggcagagactaaaggagtaaggcagacctgcctgagtcctaacttggcctcttattagcctaatgcccttggaaaagttggtggacctctctgaacttcatcttcctcatcagggaaatcatgagaaagatgtccatttgcaaagattgcttgagatcacgtttctaaagcatttatccaaatgcctcctgtagggtaaaggttcactgactggtgactgttgctgttgttcttatatttctggctttaggtagcatgtatcctctgaggagctttaagtcattttttctattacctttagtttggctaaataaataagttcttgtcacgtctttcaagttcaagagctattcctttgggttggttttgaattatgtttgtggtaaagagttactctggttattagaatctgtattacaggccagtgatagctggaattttagatgcttaagggaacacgtaagacagccatataatatatggctcccacatgtttatttttccagataagagaattttaaaaacaaacaagtctatcatctatcataaatagtacctcatgaaggacaggatatttggaacaataatctccaagaagtggcaattcctccctagaaaggtcacctttcatagacatatacacacgtgtgcatatgtgtgtgcacacaagcaaggctgcatgtttgcctggacatcctctttctctctgtctctctccatacgtagtgtgtgtgtgtgtgtgtgtgtgtgtgtgtgtgtgtgtgtatttttctctatgtggcaaaataaagagctggggctacatactgctgtctcacatattttttaaatatttgtatttttaaatacaggtgtatttttcttgctttgctgtcgatccgtgaacatgtcctcatgcatagacctctgccagctcccatttacaagccctgctctggacaaaggagatgtgatcaatgccacaggtgggggagaagagctccctgaggctcagcctagccttggggaagttgcgatctgccgagggcagtgaagctgtgggcacctgacctgctggcacgataactctgcgctcgttcgtggtcatgtttgggggtggcatgtgcttctcctccatgtagctgccgtagttcatcccaacggtgtctgggctgcccaccatcttcccgcctttggccacactgcattcatcaggagagttcctggaggagaagaaatattcttccattataacagcaatcaaagagcatgtctccatcgacttctcacaatacacagagagaaccaaagaagggcaaggcggaagagactgggggagaaaggacaagtgtgaaaagccaaatacaggcggggtgccgtggctcatgcctgtagtcccaacactttgggatgccgaggtgggcggatcatgaggtcaagagatccagaccatcctggccaacatggtgaaaccccgtctctactaaaaatacaaaaattagctgggcatgcctgtagtcccagctactcaggaggctgaggcaggaaaattgcttgaatccgggaggtggaggttgcagtgagctgagatcatgccactgcactccagactggcgacagagtaagattccatctcaaaacaaaaaagaaaagaaaagaaaagaaatgccgaaaacaggccttgccttctgtcctcccgaaatgcatattttgaagccctaactcccaatgtgatgatattaggagagagagcctttgggaggtaatttcagtttgatgaggtcatgagggtagagtcccacgatgggattagtgcccttattagaaaagaaagagaccagagctcgagctctctctctctctctctctctctctctctctctctctgccatgtaagggcagagcaagaaggtggccaggccatctgcaacccaaggacagagacctcaccagagactggccctgctggtgtctgattttagacttccaacctccagaagtatgcaagctcgagtcccattgtttcagccagccagtctgtggggctctgtgaaggcagcctgcacaggctaggacagtgcccatactggctagatgcacagaacacgcacaagggaggcggaactaccacctggcttctgtttcttaagcagctcctcctgaaactgtcatgtcaaaactccatctgtgacaactgattggggacacttgcagggaacagtgaactgctctttgttctcgcggtgtgacagcaaacaggcagagtagacagatgctgtggggcggcaccagggacactcgctgctcagtgaggtttatcctggaacgacgttccttctcaaaacctcagaatgaaatcctcctgctcaatttcaaatccctgcagccaatctttacatatggagctttgaagactcacagtgttccaggcttaggtgtagacaggaagggcagggaagggtgaggactgacgctaggggaggcctcatggggagtggactccagcagtcctagaggacccttgggaaagggatagggaaggaactgtgtggatgcagagaggggtcagctactgactactgaccgtgggcaacaggtcacagggctgctgttagtaaggcagtcactgtcatttggataaagtcaaacctacctttctggaaaaagaaaaggaaaacattttaaacagtgagttgtgaaagctacaggacattggtgaaatcgcatctgatagggaaatgctaaaaagaaaatccagcttagggccaggagtggtggctcacacctgtaatcccagcattttgggaggccgaggtgggcagatcacctgaggtcaggagttcaagaccagcctgatcaacatggagaaacccagtctttactaaaaatacaaaattagctgggcaagtggtggtgcatgcctttaatctcagctactcgggaggctgaggcaggagaatcccttgaacctgggaggttgaggtcgtggtgagctgagatggcgccattgcactccagcctgggcaacatgagtgaaactccatcaaaaaaagaagaaaggaaagaaagaaagaaagagagagagaaagagagagaaagaaaagagagagaaaatccagcttaagcagaaaacagaaaatacatgtcagtgccttcttagatggttaacacgtagatggtaaacccagggtcactgtagctgagaagtattaatatttagggtctgttgtctaaggcggatttccagaaatgcctctcaggctctatccaatgcatacatttttttcatattccttggaatctgggaaccttcgctttctctagattttagatttctatcccagtgtttctggttgtgggatccacgccaatgaagcctcatttatctcctccacttcttgttagttggagttctgcagagaacttggacaatcaaaaaactatgggcttggcatggatgtgaacttcaagtctaaggaggtcaaaaccatctgaggcaggagcgcactttctgagtggggtgagatggagaaggtcattccacacctgaaagccatagctgggatgtggacaggaagggaaagtgtttgttcagcatgtgggaacttgaaaatataggtttgttctcagcatcacttacaaatgtgtctgaagcctatggagggatcttaggtgttggcagtgaagagggtacactgccatctgcggatggaggttacagtcagggtcacgcaggactcaggccctaacatgggcctggaatgcacagccctgcctgatggcatcctcacagctgtgctaacatgaaggaaattttaaaataataatggtctgagttcccatgaagtagatcctgaatatttccaccgctgcctacacatgcattatttcctcttgatgctatttttcctggcttcacacatttatctctaaaagacccatcctaatatgaaaacacagagtgtcttcacttagactgagtttcctattcctctggaaaattccatcagttgagtagagtgtatatgttttggtatatttgtctcaaggagagaagttaccagggaagagaagttagagggattaggttctttaggaaaaagactttgcccagatgatgtgagtaactcaagtaacaactataaaatctagacaacctttgttcagattcaatcattcactcatccatttagacagctgttatcaagtgccggccgtataccaggtcccatcaattctttcttctccaacaacgcagttaacaatttgaaaagtaaaagatcaaagagatgtataaaattatagaaacaggccaggtgtggtgactcacgcctgtaatcccagcactttgggaggccgagctgggcggatcacctgaggtcgggagtttgagaccagcctgaccaacatggaaaaaccctgtctctacttaaaaaaaaaaattagccgggcgtggtggtgcatgcccgtaatcccagctactcgggaggctgaggcaggagaatcgcttgaaccagggaggcggaggttgcggtgagccaagaccacgccattgcaccccagcctgggcaacaagagcaagactccatgtcaaaaaaaaaaagaattatagaaacaggggacattgaggattttgaacccttcagaccaacccctttttcattttcttttagttctttctagtttaattttcatatccgaggacaagaactctaggcatagatcacaagagtttctctgtgacattaaagtagatccttcaggctggttgcggcagctcatgcctgtaatctcagcactttgggaggctgaggcaggcagatcacttgaggctaagtgttcgagaccagcctggcctcccaagtagctggcattacaggcgcctgccaccacgcctggctgatttttgtatttttagtagagacggggtttcaccatgttggccaggctggtctcgaactcctgacctaaggtgatccttctgccttggcttcccaaggtgctgggattacaggcgtgagccacttcacccaggtttctcttgcaaattttaacagcaaaagagtagccttaacatgtttgggatctgttttgggagcttaatagttatcagtcttcaccacagcgaactgtgttgctggcattgtctccactttccagaggtgtgaactgagtactcaaaacacaaggggctggctccaggactcacagccaggaggaggtagaatgagacttcagtgcgggtggcccgaactctccatccctgcttcttaaccctgaacagaatgactccacaaagtaaaggcaagacaatgtcttttcaaaggtaactagatcttcatttcaggaaggcatcagggactccctgacccatacactactctggtttaaggtgtacactaaagcactcatcctgacatactctcctaccctgggactgttcattccctgaaaagcatgtgcatgacacaaacagggcacatatacaagatgcaaataagaaagaggagtgattcctggagaagaaaagaattttcagagatatctgctttacttaagaaaaggacgccaggcacagtggctcacgcatataatcccagcattttgggaggccaagataggtgaattgttttagctcaggagttcaagaccagcctggacaacatgaaaaatgtgtttacaaaaaatacaaaaattagtcgggcatggtgtgcacctgtagtcccagctactcaggaggctcaggtgggaggatcacctgagcctggggaggttgagactgcagtgagctgagatcatgctactgcactgcagcctggacaacagagcaaaaccgtgtctcaaaaaaaaaacaaaagagagaaaaaaagaaaaggaaattttatcacaattcagagaactgaaaagtgttcatttgaaagtctcactataaatacatttctagctctgtgcccaagaaaagatccacactgcacaaatgtgtgtcttgattactccactgcaaccccaccttcaccaggcattccgaggctcacacatcgccgggaaaaagttcccgcaaacagcttggtatgtcacctgcaccaagcgctgcccagcatagaggaccacgtgttctccattctcacatgataaggatttggacgttcaatgcattgttttattgtgcacatgacaaagagtatgctgtgcagggaatgaacagtcctgaagtaggacagtgtgtcaggatgagtgctgcaatgtacactttaaaccagagtagtgtatgggtcagggagtccctgatgccttcctgaaatgaagactagttaccttttaaacatacacatacttttaaacatacacatacttgcatatgtgtgttgcagcagttcctgagaatattctcaggctattcagcaggtgcctgtcaaacagataatcatttagtaaatattaaatgtatctgtctttttgtttggggtggaaatttctttattgcaaataagcgtggttcaagatattgctctcacagactcctttgaggacaaacaaaaatcattttgtctttttatttaatttaaatagttttgggggaacaggtggtgtctggttacacgaataagttctttagtggtgatttctgagattttgttgcacccatcacccaagcagtaaacactgtacccagtgtgcaatcttttctccctcacccactcccatgcttcccccagagtccccaaagtccactgtatcattcttatgcttttgtgtcctcatagcttagcttctagttataagtgagaacacacaatatttggttttccattcctgagttacttcggttagaataatggtctccaactccatccaagttgctgcaaatgccattttcttccttttcatgggtgcatagtattccatggtgtgtgtgtgtatatacacacacgcatatatacacatatacccacacatatacatatgtatatatgtacatatacacatatatgtatatctacatatgcacacatatacatatataatatgtacacatatacatatatatgtacacatatacacatgtacatacgcacatataaacatgtgtgtatacatgtatacacgtgtacacatgtacatatacacatatgtgtatatacatgtatgcacatgtacatatatacatatgtgtatatacatgtatgcacatgtacatatatacatatgtgtatatgtacatgtatacacatgtacatatatacatatgtgtatatgtacatgtatacacatgtacatatatacatatgtgtatatatacatgtatacacatgtacatatatacatatatgtgtatatatgtatatatgtgtgtatacatgtatatgtgtgtgcatatatgtctatatatatgtgtgtatatatatatacacacacacacacacaccacattttctttatccactcattggttgatgggcatttaggctggttccacatttttgcaattgcgaattgtgctgctataaacatgcatgcgcaagtgtctttttcatttcctctgggtagataaccagtggtgggattgctggatcaaatggtagttttacttctaattttccatactgttttccacagtggttgtactagttccatagtggttgtactagtttccatgctgttttccatagtggttgtactagtttacattcccattggcagtgtaaaagtgttcccttttcaccatatccatgccaacatctattttttttttatttttaatgatggccattcttgcaggagtaaaatggtatcaccctgtggtcttgatttgcatttccctgataacaagtgatgttgagtgttttttcatgtttgttggccatttgtatttcttcttttgagaattgtctattcatgtccttaacccattttttgatgaaattatttatttttttcttgctgatttgtttgagttgtcgattctggatattagtcctttgtcaaatgcatagtttgcaaatattttcttccactctgtgggttgtctgtttgctgattatttcttttgctgtgaagaaagtttttggtttaactaagtcccatctatttatctttgtttttgttgcatttgcttttggattcttggtcatgaactgttattctcaaatttacattttcagttccaggttctatttgtcacccacagacattagtcttgacagtcctatgcaatatgtggcatcaacaagagtaaacaggagctgggaagacagatacttccctctgctcacagcagcagaaattccacattagccagggggccccaagaggtggggggctggttcagaattctgagaaagaactgaacaatagcccaatggctgggatattaaaaagccagccataacacctcacaactccctagcaacacccttggggccacacagcctcaaactcctgagctcaagcaatcctccttggttcagcctccctatgaatagctgggactacaggccacactccttgaggagtgtaacctctgcagcaatctcacacttttccatggcatttggtcataactgtggtcactcacaggaacacagaaatagtgtaggaagacaaccaaacattcatgatggaaataaaaaaaaccagaatgctggtgtccttcttctagtaactggagacgtgcccaatgaaactggcttgttgagcttcaaacaataatctcccttaaacagcagttggagaattaagttctaatcatttaaaatcatgagcactgacttcttaaaacatactagtattctgaattaatgagaaaaggacacggcaaagaatatcaaatacattggaaattttgttaaatttgagttaaggagagaaggcagacacgttgctaagcccagttgggttctcatagggttactgaatcagagggctggaagaagccccattttcaagcccccagacatgactgtctggaaaccacttggatgaacaagagtttagcttcgttaacagttttttagggaggggcttcgtaattttcctctgcaactccagagttctatttataaatatgtatagtggttttaaatagccattattcccctacctgtgtgcaagctatgtgaagtttggggtggcttataaaaatacatataagacaaaatgataacataaataattaacagaataaaaatgaggaaacaagggccaaaaaggaattaagagatgaaagcagcccactgagtaagcttactatttatcctgctgaggtaggataccaattcaactctgagctttctactagccaaagcaaagacacaagtgcatctgatgacaaggtttgaggtattaataagctacatacaaaccagttattcagcagaaataaagctctccctgggttaagctttgagagtttttctcggggcttctcatgaagaaaactggattatgcagtaaacaatatcgttcccaacatctcataatacatctaagaccatcccgcaccgtgccaggcgtagctggtggcagagcaggacgctccctgcacacagtgctcacatgctgcagccacagaggatgagagacggcatgtccccagcctctcctccttactggctgccattggaaagatcagacctgtcagagaagtcaatgcaaaaacatgaaaaaaacgtgtaattaaaaaaggagaaaaccttgagagatgcagtgttatacatgcctctagtttcataactcccaaatttctagatttgatttgattttattgttttttaagagacagggtcttgctctgtcacccaggctggagtacagaggtatgattatagctcactgcagtctcaaactcctgggctcaagcgatcctcttgcctcagcctcccaagtagttgggactacaggcacgtgccaccacacccagctgttttttaattatttgtatagatggggtctcactatgttgcccaggctggcctctaactcctgtcctcaagcaatcctcccacctcagcctccccaagaactgggattgcaggcatgagctgctgcactgaaacccctaatttctagattttaaattcaaatttaccaacactaaatagggtcatgtttatgtctcccaagagcaccaaatgcactgtgggtaaacaactctttccaggcctcagttggttaatcttccaaccagtatttcactgttgactaatgatgagcatggctccagactctttccacgtgtttatgttataataaacatatggataaagcatttaacatggtgcctggcacatgaccacgccaggtgtcagctattgctgttagttcatttcatctgcacatctccatgacagaaatactcgaaagcaggagccttgttacagatgaagcacagagaggttggataacttgcccaagatcacacagccagtagtggaagaattgggatttgaacctagatagtcatggtctcgactccaagtacttcaccgccccactctatgcccttgcttggtaaatccgtgtgaggagtctttcatagacctaaagcaccattgaatggatcctcagaaaacttaatttcatcactattaagtattctaaaagaacatcttcagagtggccctgaagacagtcatggatgagggttacagacgtgagctgagcagggcagccacgaaggagcaaggcagggccccgtgggagacttggaaggtggcaatgtttatgtagagatataaataggttttgataagtttggtctaaaagaaatagtcatctcaatttgcagttaagcgttctatgcttctccccaaaacttcattgctgtgcccagcagggtgcatgttttacacagatgatgggcaaacattcttaagtgcaaaaggaaaccagacaaaaagtccccatgacgagacagccgagtgggagtgcatctgactctgactgcaggcccaaaaagatggaggtgaggaccaggacaggagctggaccactggggaagcagtcaatctaattttttaagattaaataaaataagtccaagatgaaagcctccttgagctgtcgtccatacataataccccttaaacaaaaaaaaagcggggttggtggtggggactaatattactgaaaaaacatactgagaaatgtaaaatttggtctttagtctttgaaaaacaaaataaacttggcatctgactttggttttctcacatcagagtctacttacagcgaggcaatttccgtcatggaaagaacccgcaatgaaatggcacagccgtggccattagcttgacaagcatggagcctcagcccttgtgagtgtgaatgggcctcatttatccaagaacggcactgaatacatcccagaggggcagccccaagctcgctggccacattaaatctgattcaccctcacttcagaacacttagcaggggcccactccttggagaaagtccaaggcaagtcagaatgtaattgcggaaatcaatatgtcttcttctttgagtcagtggaggcaaacccgctaatcctgtcgaaaatctacctattcttctagagccatcctccttcctaatcctctgaattcctcttgcacctggacacgactttccaaccccttgttctccatcacatgctggtgaaatgtccccgaactcttccaaagctttctccctcctgctaccagagtgctctcccccaaacagaaatgcaagctgcccatgtccaacctaacccccatcatggcccagagcccctccctagattctcctcagtgatctggctctggagcccctcaattcactcatttgtttagcaaatatctgtggagcatctttctaggccaagcactgccccaggtactggagttatatcagtgtctctattaacatggggctggcatttgagtagccaaagcccctctccccaactccatgtgctctgtgctcaaagaccacattccacatcaccccctagtctcttcccttcaggccttcacttttgctactccctctgccttcaaggcctatgaccacctgatacctgccctattcacctgttcaccacctggtacctgctctattcacctgtccatgctcacctctaggttctctacaagcctttcctgggccgccagagaggaatgtctcccttccaattgcaccattctctgtattttctcagtaagtgtctgcaggatgagtgagtacatttatgaatgaatcttccatttaaatattgagttccttatctcatacctgcagtgcaagagaaagcccctcgtgttgcagtcagaaaaccattgctgaccttggttgaccttagatgggtcacctaacctttcgaggctcaactccttcattcataaaaatgaatggatgctttcttgaggttgctgtgaggacatccctgagatgatgcctgtgaagaaagtctgcaaactgtgaagcactatacagattaacacagcaacatactgcatgtgcatggctgtgcatgcgtgtatgtgggtgtaaatgtgaggctttttgttcttggcaactgttcataactgtacctcggtgaactcttaggtaggtcaggaagctaaggtttactattgtgcagtgttcagcatgcaactgctttttggaatgtcactgtctttctgaatgttccttttggtttattaggttagttcacattaagaagaacttggtgaggaagccacatggaagaaatggaaaggctttctttggcagctctaccctaagagggcaaaggggtcagttctgcgagagaacccccacaaggaggctggcccgggacaagcattccaggcctgtctcaagtctgaatacaaataaatcccttctcaggtggttttcttcataaggatcctaaaagcatatacttagtcctaatcgactgagcaagctcctaatcaagtttcatagtgtgaatcgaggtcagtcaccacaaaaggtatttttaggaccccagacaaggaggggattgtctggagcgctgcagggtaatttgtgggtctgttttatttctgaatcagaggcagtggaaaagctgtttcagaccccatggctggagcagcgggtggagctcagcagtgattcatgtagaactccgggctcaaactgaaaccgtagatgtttgtcttcacagctgtgtgttatttttacccttactaaatattctctcttacacctggaatttcagcctcttcccaacagtcctgttccctcccccttccctgaagcagttgaagacaaaattaattaaaaagtcaccaccagctcaccaacagttagttctttgtccccttaaaggggctcgatgtttccctgagaaagtttcattatttaagtttatatttctctttacagccaaaaacgaatgccagcaagaccgtgttgcttttagatcttgaaaactggagggaaatgcaccattttgggattcatcatttgaaaacaaaatgttctgtagcataagatctctacaagcagttacatgacaaagatcagatgtgacatcttttctatcttgtgcacgtcttttaatttgtctgaaagactcctttttcagagaagaaaggattgagcccaatagccagtatggtgcttcatgtttttataacaggccaggtgaatcctggtaaccaaaacaattttactttctttttttcttttttttttttttttgagacggagttttgctcttgttgcctaggctggagtgcaatggcgcgatctcagctcactgcaacctccgcccccactgggttcaagcgattctcccgcctcagcctccgggattataggcacctggctaattttttttttaatatatatttttagtagagatggggtttcaccatgttggccaggctggtctcgaactcctgacccacctattatttttaaaatgtgattgttttggaaacacctggtgaggttaatgtaaaggtgagtgcaggtgaactgacctgatgtgataaagtaagatagtaataaatgtttctaaaatgtgtaacatatacaaaaaatcaaaatgcagttggcacttggatttggtgcatcttgtcactgcttgtctgacacgtggagagaaccttgctatccctctcaatgcaggaaagacgttcagcttcttctaagaagccctgagggagtgaagaagagtccaggcctgtggtcaaatggccaactttcactttcactaactttcacttgagcaagtgacgaaaacttttggaaactcagtggtcatccgtaaatgtgaataatcataataatgtcatctcatagatgtttgagaaaactggacaatatgttgtataccaaaatctattaataaatcatgtgggttttagaaatatgggttaatattatccctttcagggtctttttctcctgcccaggtagagttgatggtaccctcatatctgttattgctgggccctgaacatcgctctgtactgaatgtgtcttatgatctcacagaatctttttcacctttggtagaccatgagctcctcttagttccttttttttttctttctctcttttttttttttgagacagagtcttgctctgtcactggagtgcagtgccgtgatctcagctcattgcaacctctgcctcccaggttcaagtgattctcctgtctcagcctcctgagtagctgggactacaggcacctgccaccatgcccagctaacttctgtattttttgtagagatgggggtttcaccatgttggccaggctggtcttgaactcctgacctcaagtgatctgcccacctcagcctcccaaagtgctgggattacaagtgtgagccacctgcacccggccagcttcacttaattcttaatccatctccatcgaagctaacacagtccatgatgcagattaaacactaaatacacgttggtttcctgcagcatttgtcaacttcgacactagtgccactcggagccaggtcactctttggacaggtgggggtgggggctgcaggggcgctgccctgtgtactgcaggatgtccccggcctctacccaccagacaccagtaacacctcccagctgtgaccagcagaaacacgagcattggcaaatgcctctgggggccacatcacgatggttgagaaccactgggctaatgaattaagatccactgagctcaggcaaggaggcaagagcctcttgttttacctggtgtttattagagagaagttcctgtccccagtgtctggggtgatgcttaaaaggggcccttaaaggggcctctatgctcatgaggattcctagttatggtttgtccgtaccttgtttggggtacattccccaagccttggcccatcctcgcttcctcttttcctcatgccatatgtccaacccatcagcaaagcacgttaattccaccttccaactatacccaggatgcgactgcctctcccaccctcccttgctaccactctcacccactctcacgcagatgtctcccatcctacacccacattttctcaggaagacttcaacacaggagccagagaggccctgcaaaatctaagtaacactatatccctcctttgcctcaagtcccctaatgatttctgaactcaccagaaagtgaaagtcaaagtccggcaatggccccacgggctctccaaactcatcatctattactcttcttcttggacactaaacagcagccacgatggcctgcttgttgtcctcgaacacctcaagctgacctcagggcctttgcatttagcattccctcctcttggaatattttctgctgtttaatcacgggcattctccctcaactgcctttgcagctttactcaaacatcacttttttgtgatcttctccagccaccttctttagagctgccatccgcttcacgtctttatttttctccttagcatttaccatgatctaacctgctgtgttttcataagtggtctgatgtcatgaccatcttcactgctagaaagtgaacttagtgaggcaaaacttttttgtatattttatcactctatcccaagagactaggaaagtaggtgctcaataaatattcattgaatgaatgaatgactccacgcataaacagtatgtctaaggccctgatggacccagcagatactccctactttttctcatctccatcacatgacaaatggcatgttttttaaataacatctataaaacatcctgctatctgacccgaggctggagttattcatggcatgcaatgaatctatcccagagagaggcaaggcccagatagcattgtctctcgctgcacaggcccagctgggcaaagcgccaatgtggcgggagggaaggaggtatttctcaactcaggcaaggacttctggggaacaaccccacctccgcgtagatcctcccagatcattcgctgggtgggtcacctttacccagctgctgggctttctcatttttcatctccttggatcgtgcaacagagcagtggttctcagactaccaggcatcggaatcccgcagagggctccttcaaacacagcgtgctgggctgccacccaggtctcttccgattctagggcagggcctaagaagccgcatctcaaacaagctcccaggtggaggtgatgctgctggtcccggagcccacgctgagaatcaccacaccgggggaaccctcactcaacagaatcaaacatggcaatggctccaggtggcctgcagactgggctgaggggggactcacagcatggcacataaattgactgagttccacctgcagtgagcctccaggtgggcttcacgaaatcgccatcgcctgtggaaaggggaaggtgccacttagtgtaagctgcctgtgatctggctggcctgagctggggatgctcagatggaggaaaagcagcctgctctgcacagacctgccagcctgctcacgagaagacagtttgcttgtggaccatgagtgagcaggtgttacctcttggcttatcctgctagtctatcatgacttgagctttggggacctcacagcaaattcagggcattggtagggagctcacgagaggctgagcaggcgctgaaactcccagccaggcccttggtgtggatggcacaggaaaacagctggttttagtttggccacacactgacagttctccattgtgtgaacacttggggctttctggtgcgtgaggctagagtgaagaaagggagagggtggctgtggaccaccgaagctgaaaaatgatgtcctgtgtctacacaacgtgcaattagattactgtctgcaagaatgctgctgtttgatctggcagtggccaagccaaacccacaaggacatcccagttggctcgcaaagcagtggttcctttctctcctgtttttcttttattatgctttacagaaactctattataatggcaacagatctcgtttcaccacttgtatttcatttcaggagcttgtaagcacgttaggactgaggttttgtagaattccactattcggttgggaactaagtccttcctttctctcaaagcacatggcctttttctccgtgggtactggatggatagggatggacagagggcactattcccaagctgggtattctaggcagaaggaggtgggccatgttctggaaagacctaagctgcagagagtgcacttctcccgtggaggtgtctgcaagatagtcaggggccacaaaggtaacagcccacaagttctagccaaagagtaatatttgacttacgtaacttccccttggacttgacttcaagtggcatgtgcactacaggaaagcccattatgcataagctaagaggagggacaattagaagaagctattgggccaggggccaggagatgggctaactccctggcacagctggcctggggcttccgagtctggaaggatgcaggtgcaggtagtggagcgttgaggagctgcactcctggcggggctcctccagaggcaggcagccacacactgctctgcagcatctcatctgtgagcccctccgtggcagaatctgcgtctccgtgaaccctgcctctgccctggcccctcgagctgggctgacacagcccggtgctggttcacggtgtccaaaataaagcagagtgaatcacgcccatgttcccttttatggagctgcacctgacattcgtaaagagcccatagtgaggccgggcatggtggctcacgcttgtaatcccagcactttgggaggctgaggcgggtggatcacctgaggtaaggagttcgagaccagcctggacaacatggtgaagccccatctccgctaaaaatatgaaaactagccactcgggaggctgaggcaggagaatcgcttgaactcgggaggcagaggttgcagtgagccgagattgtgccattgcattccagcctgggtgacaagagcaaaactgtctcaaaaaaaaaaaaaaaaaaaaaaaaaagcccacagtgagtcagcaaagcctgcggatgggatcccaggcagtcctttgtctgccccaaggctgcctccaacctctggctgagatgagtcttagctccactgataactgttcagctttcttttcccccattccccttcaggaagcccgttggattgttaatagcagaacactgactcaccacttatgtttcaattctttcagatcactgagcttgagcagccccctagtgaacctctgacctgacacgccaccccctttaccacccgctgtccagtcaggctgagctccagcagcagcggtgaactggccccccagagcacactggtttggagatctaaaaagtacaatgggtcaccagtcactgatgagtgcagcatccctggaagtcaggtgtgggggtcagtttcctgtgtcaacttggccaggccgtagcacccagtgacttaatcaaatgctaactgaggttgtactgggaaggcatttgcacaggtagctagtcagttgaacttgactaaaggagatgatgtcagataatgtgagtgggccttgtctaatcagttgaaggccttaagaacaaagcctgcggtttccagagcagaagaaattctgcctactttccagcctgccagcctcccctgcagatctcagacctgcccactcccacaactgcattagccaattccttcaaataaatatcttaaaatgtaaaaatatcctataagttctatttctctagagaatcccaactgatacaccaggccagcacccagacacaatgccaggagacacactgagctctgggggagacgggcatgagctctgtatctttctcttctacaaaggggattagtgtcagccactcctctccctccccctggaacatccttgtgggtaggggacgatgacacttggtgactggttgacatctgtacattgctagatgcctcaaagcggaggcagcctctgcagccagtgttcctcccctgcctattacaacccagctgcccttttcctcaaaggaggcacgtaggcctggattgaaggcagatgaggtccaccttgttcccttcatgaacagcacctgccaaaccgacatcaccgaacccaccggaggacccggaggatgaagaggatgacatgatggtcttcactcggtatccacccaccaaaacacatcaccgatgctttaggagctggaacagcattgaaagtttatgacggcagcaatctgggcaatgttagaattctatgagccctgagagaggaactcttaaagttcccattgtttccttgaaagaaaatgtcaaggccgggcgcggtggctaacacctgtaatcccagcaatctgagaggccaagatgggtggattgagttcgagaccagcctggccaacatggtgaaaccccatctctactaaaaatacaaaatttagccaggcatggtggcggatgcctgtaatcccagctactcaggaggctgaggcaggggagtcgcttgaaccccggggggtggaggttgcagtaagctgagatcgtgccacttccctgcagcctgggtaaaaaagagcaaaactccatctaaaagaaaaataaaaaagaaagaaaatgtccagttcccctgaaaaagatgtttcccggaaagagaccctcagcgcagcaccagcctttcacttgcctgacagaaaaaccacccaagagctttccccagtctgctgcgctgagggccctggggcggaactgccctggtgtctttcttatggactgaagctcctggtgtctttctttcttatagactgtagccccttgcctggggctcagggttaccccaaactcccaacctgtacccctggggtcacaacacaggctggaaaagcttccccatgcctggccaggagggagaggagacatcagctaccaaggggcatcacaggctcacactaaggaaaacagtgtttgcacttctcccacaaacagaatgcttatttttttattttttatttttatttttttgagatggagtttctctctgtcgcccaggctggagtgcagtggcgcgatctcggctcactgcaagctccgcctcccgggttcatgccattctcctgcctcagcctcccgagtagctgggactacaggtgcccaccaccacgcccggctaattttttgtatttttagtagagacagggtttcaccatgttagccaggatggtctcgatctcttgacctcgtgatccacccgccttggcctcccagagtgctgggattacaggcgtgagccactgcgcccggccagaatgcttattttattttaaattcgggagtaacacagtgagaacaatagaaactttcatttctggagcactgttctcgcctcctcactcagtctcccttcggaggcttgctgaatccagactggccccaggccagactctcaaacaagggccaggacatggctcactctgcctgttgtccatcggaaatcatctcagtgcccttttgtctgagatgtttccttcctctctccccaccttccaacatccccctcctccctgcaggtgaattgctcataggtagaaattagcctctgcagaagaaaagctttagaaatgtgtcccggtcttagtgtctccgccgtgatcacgctggcatatatgggatcatatgaccccacccaaaacagaattcattcagtgtttccaggctgtgttccaccaactgatctactgcataaacactgctgcattctttagaacatgattaccctgcattcttctgtgtttcagaaatatatatagttaatgatcaacagaaacattgtatcaaatgcataggatttatgggtaaaaaatatttacatgtaatcattaatttcccacaactttggtgtcctggacccatcattgcattttctatccaggtccttctgtaactccaggaatgaatctcttgatgagattcaaaaatatttacatgtaatcattaatttcccacaactttggtgtcctggacccatcattgcattttctacccaggtccttctgtaactccaggaatgaatctcctgatgagattcaagatgggcctgcctcgagttccacttaaaggaccagtgcggtggcaatatgtagcatcagagccagtgcactttcaagaagcagatgcacagacgcaaactgacttctcagagtggaggagtgttctggcatctcccatctccccatctggcacgtccagccttgccgttgacattccctctaggacactgtgacttggcaccttcattaacaccacactaggaattgacgcaaccgtttccagacttataaactatgacacttataataaacctttttagcgttaaaacatatatgtaacaaaaaggccccattacagcttcaacagagtggaaaatgctcagggtgtggagtcaaacactcctggtttaaatccaaactctgattccatttaagtggtgatttggggtcagactggaaatgcctgatcacaggtttcttcatccatcaaatggggtcaagtatacttcatgaggggctgctcggaggactgaggggctactggatataaaagggctttgtacacagtaaagtttccgaaaatgtgagctgttcttatgacctgatggtagattatgcaacatttcgaagaaataatctgttctttatcctaagatttgatattctttttcctgaatatatatggggtattagatcataattgaaattaattttacttttcaaaactacacagaattcaacactttttgagggccagggacagttctgcatttggtaatacattttacgtgacagttgtatgttcatgacaaactcagggaagctaataattatgggagacactggagagggctttatgtgtaagctaagaggaggaaaaaaaaaaaaaacaaacagcaggcattaagagaagaggaccgcagagatcagagggtggggtgagggtggagggcagacaatggagatccactagcaaattcaagtggcttggacatacgccgcactgcctggccactagctgacactctccctttgtgaaaacataagacggcattattttccaggcaatcaaacctcagatgaattctgccatatgtgggcaaggctcccctcccacagagccctcgtgcctgggaaatagaattgaacacatcttcaaagagagttcttggtaaatatactactaattttacaaactccatcctctacacaaaccactggagaacacattttcccagcgctgtccaacgtcaccgttcaatggcctttctttctttctttcttcttctttttttttttttttttttgttagccagagtcttgctctgtcgcccaggctggagtgcagtggcatgatcccggctcactgcaacctctgcctcctggattcaagtgattctcctgcctcaggctcccgagtagctgggattacaggcacagtggccttgctttctaagtcaatctttagagaagcatgactgacttccactttgcctttgcaaaggataggaaaatgggaggtcagggagagaaaggggcggaagtctccttaccttgagccattcacctggctagggttacattccattttgatggtgaccctggctgggggttgagacagccaatcctgctgagggacgcgtgggctcatcttggaagtctgtccatagtcgctggaggaggacgcggtcatctctgtcttagccaggtgtggcgttccgtaggcacactcaaacaacgactggtcctcactcacaactgataaggcttcctgaatgcccaaagaaacacataattcaagacactccaacagacagtcatgtttcaaaaagttgttgatttcagagtcctttctaactgggaccacattttagatcgtttttatggtctccatttctacctttcagaagaaaaaagtagcttgtttttctttcctcgggacagtaagagttagaaatgccagcctagaaaaacttttatgcaggtctcgaagcatcccaggcttgactgtggcagggcagcagaatatccactttaatctcaacttaaggaagttgaatttcaaaggtcttagaagacatccaattgcatgtgtcactatttgacaaatgcaatctataattcaagcagacagggtacagagcggtcatgaggattaaaaaaaagaaatctgaaggccaacacctaagcatctggcaaaattgccacattcctggggattttgcggaagagggacttagaggaagacagagggatcaatggagcaccaaagggcaaccaaccaaagatacaaacgtttccactctaagttattagccgaagtacagtttcaagtggtgcttccatgatggtgagcatctggatgataaatgaaccaaaaaaaaaaaaaaaaaaaaaaaaaaagctgtgaagtatccagatgcttccaaacagcaggatgtttaaaatatctggatcactgacaagctcttttttccccttactttcaattaatatcttcgctcttttgcatgatttggtgagaagaaatagcaatttgtcattgttggatcaatcatttttcgtggttttaagtcaaacaagtggttagccaatggctatgtttatattctacagccaatgagcaacggcaagtttgggaaatttcaacgacttaaatgatggcttgtgctgcaatgacacagagctgttgtgatacaatccaattttggttcttataacagacaaaaagaattccacatgaatgctcatttttatattagtcctttggcatcctcagtattgacatcaactagtgagaagcaaaggctagttgggccacacatttttatttaaaaaaaaagaaaaagaaaagaactttggaggcagagcaggggaggcaggggagtgtgggctgcgcagacccttccagtccaaacttgtcatctccaaatgagaaatctgagacccagaaaggtctagagctaatcttgaatgagctggccatgatcaaccaggggattagtgatgggaatgacttgtgtattaccatctgccttctccttgcccccacagccctatgatgccctttgtgacatttttttcctttgggacatgtgtttaaattagcaccctcttccccttctctgagatgacctttacataaataagggtgcttcccatcagtaatcacaccctagaagcagcccttctgagatggagagcttcctctccacccagaaggatcagaatttttaggaaacaatcacccccaactccacatctactctgtcgctcgatcctccacctgtcccaggaccaagttttttccttagcttcccaagtgcacaaacttctttgccagacacacggcactgagaatcagcaaggaggaagaatcaaaacaaactcaaacctctgtctctcaaagtggtggtcaggtgtctgtgctaaagcaaaagcccccatcctggactccataagtatctgtagaattacagccctgtgacaccctgggaaagactaagcctgctgtccaaacagtaatgcaaaatgtaccaaagagtcaggtaggccagacagagaaccagaatcaggcacaagggaaaaaagtcatcttgaatagacagcaaaatcaaactcatcaacaaccaaaaatgatacgaggcagtgacacagaagttgacagtacagaaacggcatcctagatgttagggaacctgaaattcatggctttctcttccagtcacaattgagtggccaaaacaaggaatctaaacacatagatgtgggtttcaaagtaaaatcagcaccatagacttagtcatgctaattaagacaaaaattagaccttattaaaaaatttttgcaaaacagatactcccttcccatggtggcactggctagtgtgttttacaggctcagaacaggaaacagagctgatggctgctgcctctctccttcctgggcctgagactcgaccaaggctcgcaggggaataacacactatgtaatgttagctttggctcacccatgatgagaaacatgaacaaatgtgtgatttatatcagaaattggcgaaaacaggttatatatataagaaacaggctaaatttaaaattacaaactaaaaaggaaatggctgcaacaataacaaacaagcaataactttaaagtattagtatttctccaagataaagtaagcttacttctgcaaacaaagccaatagccacaaaaatgtagtgtaagtttgaataataaaaaaaagaccaaaatattagaactaaaatgaagcttaagtgtgtgtttgtaggggaaggaatccattctcacatctggcaaagcattatttcagcacatggttttctaaagaaagaaatcaaagttaattgagatcgatttaggaaggaaaaaaccctcagaaatgctagagatgggggaggcatgcctcctttttttgcatcttaaaattcttctcacagctaatattgcacaaaaatgaggaagggaatataattcagaatattgaaagcaacccctcagttgcttttgttcattagaagggaaaaattctgaaaataaggaagcttcaggataaacacttcaaaagaggtgaaatacagtccacattttgaaaagacagagcaacccaaactatgccccaaagactttgttgattgtcactcaacaaaggctgctgaacacctaggatgaagtacagctcaggaaaaggaaacaaatgaataaagaaaatctctctcacatacacattttgggagtaagaagaagctgaggggttttcacagacccattcccacaacagcggtcactaaagttaagtgctgctcttcagaagcaaaccaaggcacagccctgccacatctttgtcctcccacttgacttggctgttggcaggtttcatcatcccttcggttaaagcttgaatggacacacgctgctgcatagggccctccctgcctggcagccctgtgacttcaaaggggagagaggatctagcccagtaggattaaaaccagaaaaagagtgctgaacacaggctgctaatcaggaccacatgagttctttaactccagctctgggagagacttcctggccttgactgacatgtctctccttccctgcagcctggctcctcctctttataactagcagatctcacctacctacttacctgcctgcctacctgccggccaaggtaggcagctgccttagttagcatgtatagattgttattgcagaaactctggccagccacaaggcttgggatctgcttcagtggctttataacagagaatattttaaacgtcaaaatctggcagatatgtggcataatcatttcatatgcctgcttctatgttactataaaaagacctgaactttagattggtgtttgccaatgtgtggggtgtttttttctgtagctccaggaaagttgggatattcccatcaggcaaatggcaggctaccaagctcatttttaaataacttacgagaaacacataattctaagcaaattacccccaaacaaaaggtactactgtgttagtactgtagtattgattatttcatttcaatacggaatataccaataacacatgaggaccattcctttggattttggtcatgggataacagttccagaaatgaagggaggtcccaccaggttatatttcatattataactctaaaatatgcatctattttcaagtaactagagtacaaaaaaggatccaaaatacattagaacactgaaaaagaaaactaacaaagttgaatgcatactgacattttcagcaaagtatttcaggaatcctgatgcctttctataacagatgaatactttgcaagatgcctatttctcaaccaaagtattagaaaataaaggcccaaaattgattctaatttgtgatccttatagctcataaaaatattacattgttaatacagagaatccatcatacttaacctcttttgaaaatttgggagtggtaaagtgttgaaactgagaaaatctttaagaatggtcaggtgaatttcacatctggagtaagcaaaggcatccatggtcctttcgtggttttcaaaaattaggaagatggccagaactaggcctctcgagaattggattatcaaacccaccttcaatgttttcaagtcttatatgctataattatttgataattatgaaaaacaaatggaacaactaagtggaacaagaattgtatgatcatgatcatgcttaaaaaaaaaaaaatcttggttcgggcatggtggctcacccctgtaatccaagcactttgagaggccaaggtgggtgggtcatgagttcaggagatcgagaccatacaaaaatccaaaaaaaaaacaaagaaaaaaaaatagccaggcgtgatggtgggcgcctgtagtcccagctactcaagagggtgaggcaggagaattgcttgaacccgggaagcggaggttgcagtgagccgggatcacgcgactgcactccagccgaggtgacagagtgagactccatctcaaaaaaataaaataaaataagaaataaaaaataaaaaaatcttaaagaagtccttgctgctatcacaacacagtgtggagatcattcacttaggaagccagcatcatcttcaatcaatagcctactttttctgtcagttttaatcccattacaatccaatacaaaacccttccttaaatttccctcacatataaccacgcagaatttggtacatcacttaactccctatattgccatcttttaaccactttcataaatagcttatccaccaaataaaccaggttaccttaagcactttcatgcaatatcctcttaaattctattttgttgattacaagatacaccacttgtcacattttatcagctctgaaatatgaaaatgaaaggcttatcctaggtatcaggcagcatttcttcttctctgatggcagataaaataatgggacattttatatccaatgacatcttacattttatgaaaaatgatcatttaatccttacaattgtcctataaggtcagctgtgattcttgcccacccatcagaaagtgcgattagagaagtaacatcaacagtgaggatgaggcagaaacagggtttgtgtctgtgaatggaatcattccccaaggctgtagactggccactacctggctgttactggaaggaagaagttggattaagaaaagtcacacggtggagtgttttggtgcctgctcttgccatgagagatggaatcacctagagagagacagagagagagaggctggtagagggaagagacagaagaaagatgaagggataagtgtccagaatccctggatctgggatggaataaaggatctggatggtaaacggagagtgctgggaaccagtaaggacttctctaggtataccatgctcttctatgagcctaggggatgtgtagcaatgggccctgcatacagttaatcatttcttttgcaatggcttaaatcaacaaccttgttcttttctttgattaatcagattattcagacacaaagacatggccaggtgttgggatgtgttcattgcaggtggatgcctgccttctcttaatgagtactatgcaggaaaactaggacaggtaggagtaccatttataaatatgctggagcctatgccactttgggcggcctttagtggatgtctgcagacctaaggatattggaaatctatctattaggctgtcgcaggctctattgtttatagtttctcttcaaggcagcacatatgcagtagatgcttctaaaaggtctagtatctaattgtatttggaggaggaaaaaacaacacaaacaaaatagacaatgcacttagagaaagctctgctctcccaccataagcctgacaaagatactccagtccttcaggagtttttattctaaatgtgtgcacttttgcaattctgatgccaccagtatctcattaaacaagaatcttcatctgaccagtgtgtcttttatttacaacacacaaaaaagcgaaacgtggtaagtgaaagaagcttcacaaagctgggtatgatcatttttgccccttcttgatatgattttcttttcttcttaattcttcagagaaggaagtattaacatcgtatattaaatgcagcatctagctttgtgttcacgtttttctaatttaacacattgcaattttagtccttcaaaactataaaaaaaatcttggattaacctcaaaggaaaaatgtatgtaggcaaatgaagtccatctaaagagagtatttctccaatatggtatcacttcagtgtcaaataatttcaccactcacaacactagtccagtgctaagaaatgagacccagaactagtgtccagatacatttgcacatacagatatacaaacacatacacatgcttacatatgtacacatatacatgtgtgcatgcatgcaaatacatacatgcgcaaatacatatatacatacacacacatatatacagatacgcacatgcatatacacaaatacatatataagtgtatgcatatatgcaaatagatacctacagaaatacatgcagatatacaatacataatgtatatacaaaaatatcatacatatgtatacatattactaaatacatactaagataataaggagagatgaaaatctttatccttattatctttattaatagaacgctttagaggactttcagatattctttatctttaatcatatccactagggcaaatgttgcctaaaagatacagagaacctggcttcttcccatttcacctctgctccttcctctctcatcctagaaggtgcttttccctatgctcagcacatcccttcagaacagacttagctggggatccatcccctccatgtccttcagccaattttcccggctctggactcacagactttctcagggctctgagaaggcctggctggtgccagcaattctctttgcccacatacttctcccctggccttgcctttattcaaatataagcattttcagggctggctcctctgtatgtctgcctctagaaataagataatttcttaacctcaaatgcttgttggtgttcatattagccctaggactaagacatcaggtgatattacagccccatcataatgctataaatgggatccacaaacttctattacatccaaatgaagagacgtgtttttgtgagatgaatggattgtgtagccaacgcccaggagttccagggagtttggaaaataattgccattggcaatatgtctgcagtcatactaccaaagagcgtattattgcagagtttcaccttcaatccacataggcttaaatagggacttcctatagctaagcaacctatgaacaaaataagacttactggaaaatgaacgtttgcaaaagaaggagggagcattcaatctggaaagcagaaactctagaaatattgtgaaagattggagcatggtagaaaaatgttaaagaaagaatagttatgtccacataatgaaaattagatttaaatgagccttgggagatcaagaatgtcaaccaacatcattttaaaacaactctgttttctcagtgccatgcagaataaacctcgaatgcatttgaaaggacaatgaactgggactctttgccctggcaaatgccatttaactgtttaagaaacaacatgcctgtgatgtgaatagcttcttattttcttctttaaagaatcgcttttttggctgggtgcagtggctcactccagtaatcccagcattttggcaggccgaggcaggtggatcacctgaggtcaggagttggagagcaggctggccaacatgatgaaaccctgtctctactaaaaatacaaaaagttagctgggtgtggtggtgtgcacctgcaatctcagctactcaggaggctgagacaagagaatcgcttgaacccgggagggggaggctgcagtgagctgagatcgcgccacggcactctagcctgggcaacaagagaaaaactccatcaaaaaaaaaaaaaaaagaagaagaagaatcactttttcttcccagtaggcttctttccttctttggagatgagcaaaaagtataaaaacatctgtggaaacctcctgtttgtatgttttacattggaatgggtgcaaaaaatacactcactattcctttacatccttctaagagggctgtttctactcttgacactcaatacttgtttttgtttctctaatcactgttatacgttactcacgaatattcatcaaaacccttttccttattttttatctagttttaaataattcatttgagataaaaagaagtttttctttgctttttttaatcactcagtggaggatgaacatgaagctgtaccaatggataggagaccgtctggtagagcacgggagccagggatagggatctgaagatggaagatgtgagtttcaagctgggctctgcccttgctctgggaatcacctgggtaaatcctttaaccctttcctgccccaagtgtgagctgagagcttgccagaaatgcagattccgagtctccagccctgctgagtcagaatctgctttgtaacaacttccccaggtgagctgggtgcctgctcacttcaacaagtgctgcattatccttttttgactctcaatttcttcaactataaaggtggtactgatggcaaccagctgccgagcagctctctcccaggacagttaaatgggccaaataatctagtgtgtgtaacaggtttcataaatcttaatattgtatttaaattatcatatgatagaagggtgatgtgactgactccaaacctctgcatgtgaaccatcagaattatccattctagtcatattattctaacaagccagatgcaaggaaaatcacagtctcttgtgtgcaaattatcacttattttttgtaagtactggattttcaaaccaagtatctacctaacagaggggaagggagatctagcatcttttacttcaagagcacgtctgtcactttgatttatagcctttttggtccctggtccagttcttttgtgggttttccattcaaattctacattagtttgtttaatgtcaattaaatcaaagctttgtgcaggaaggaatgaatcctggtacactccccagcgtgctgttggtattctctacataacaagataataaattaatagatataccatggtcttataacataatgttctttttctttctttctttctttctttctttttttttttttttacctagaatagcacaaggcacaaagttgatagccctcaaacttctgaagaaaagtcttttcttccaggatgtggaatccataatgctttctatgttaactttccctaaaaattgttgaatttttcataaacttctatgaggaagtgtttccatggcagtctggctaagaggttcacaccatcattctgtcctggtgatttttgaaacttacaagcccaggttgaaactcaggtgattcaaggcttgagaaacacaaaggccaagctcaaggagtagcaaagttgcttgcactttttttctattggcatggtccttctctgaacaccagggaaggggtggtgcaccacctctctcctcttcagaaggagctccgtgaaaaatcggcagttttatgcttggccctttcaaaacacacaaaggctaaaaatacagtgtgctacgcatctggaatgtgtctcatctgtgaatctctgacacatggattcattgttttcgataaaattccaggaattttattcatgagaaaattctggcacaatggaaaaccctggcaagcaaaagataggggcagcagatgtcctggcctccacccacaactctgtctctgcttttagctaattttcatcaggtgtcactctcatgccttcaaacactcaattcaaaatttcccataagacgggggtgagggggtgggggtgtcaaaacagccttaattttttaaataattggtacggtcccccccctccccacagacaggtgtgtcacaccaggttcaacatgcacgtgccaggatgcaggatgggcactttaagaagaagccgcaagaccacagggccactggccatggggctccaccactccgtgcccctcatgtaccaagtcttcaagctcctcgtctaaaatgagggtctggtctactgatgttttctaagactccattttgcaccaaaatgagatcgatttgtttaactagtaacatcctctttcagccatagccaggctgcagtctctacctcctccatctctgagcagacatgcagataaggtagaaatctaccatgtatggagttgctaaaaagttcctatgcatccaggttagatgctaactgcagggtctttccctgctgcccccagactttaattttcctcaatcttgtaggtatctccttctgtgctaatggtaagaagctagtcagcaccctgagagctagtgttatgtttttaagtgtggaaaggatctactctcttgcatgggaatatggcatctgttctacacataaagcacttcaataataataataaataaaaaaatttaaaaaataaaaaacacatggcaacatggtaataccaacagaaagtcttgtagaaactggggttctggcagacagaggagcacatgaataagtctccactattcacatgatggtccaggggtctccttcttttgctttctatccccatccccatcattgttggcatgggccacacactgtataacgcagacatgaacacagacgttttctttttcttagacgctgacttacgtagaaagagttagtcttcacccactgtgagggtccaatccctgccaaggtctttcttcagcttggtaagtgatgatgtctgactccctggggctgggatgctaagcctgtgcttttcagaagatttttccagcacataaatatatcctggttgctgcatggaaaggggactaagtagccaggtcatcagagccctttgctaatgttatacgctgagctcatgcttttcctatgacatagatgagcactgggtagaccccgtcctggtaacacttttcatgcactaacaagttggttgccagtgagacttgatttttatgactctgggagtgctgacctcaaaacctaatacatttgaactaggagagcaatccctccaacaatttcaaactacacatacttacatcacatccaatagggctcttttgccatctggcttgagcccctctataaatatgtctactttgaaagtcacaagcctgggcggggtggctcacacctgtaatcccagcactttgggaggtggaggcaggcagaccacgaggtcaggagatggaaaacatcctggctaacatggtgaaaccccatctctactaaaaatacaaaaaattagctgggcgtggtggcacatgcctgtagtcccagctactcaggaggctgaggcaggagaatcgcttgaacctgggggacagaggttgcagtgagccgagatcatgccactgcactctggcctgggcgaaagagcaagactctgtctcaaaaaaaaaaaaaaaagtcacaaatactctttaaaagtgtgcagagtcattcatatccaaaccatcaaggcctgcccaacagcctggtgacttgaaatcttgacgtgtacacagagtctaaacctcggtctttagattgcctccttactggacctctttacttattaagattcatccttgtggaggaagtgaggtcatggatgttcacatctatctttcccaggaagaaaaggaagcttcaagagctgggaaatgctatgcaccactgtgcaggttctgagcagcacagagccacctgtggggtgggcgggtaggtgagtagtggacatctgaccaccaggcgctgtgcaggactacctccttgcagagcaggtggggccttccaagttgcctactcatccaacctgcacagtaagccttatgggagcgtcatggggctacgcctacttcaaagagcaacttagctaaagggaaagagaatttgcacttgctctcttccactctagcagacttgcacttgtcgctatttatttgtgaacacagactcattttagattgacttaaaaataaaaaaaagtgcaaagaacagggcagctggaagttgggaaaccacttctgccactgctgaatctgaagccttaagctcctgaactggaaaaccagccgactggagcactgagctccctgggccctgtaaaagagcacactggccaggcatggtggctcgtgcctgtaatcccagcacttttggaggccaagacgggcagatcacgaggtcaggagttcgagaccagcctggccaacatggtgaaactctgtctctactaaaaatacaaatattagccaggtgtggtggcgtgtgcctgtaatcccagctactcggtaggccgaggctggagaatagcttgaacctgggaggtggaggttgcagtgagctgaggttgcgccactgcactccagcctgggtgacagagtgagactctggctcaaaaaaaaaaaaaaaaaaaagaatgcaccaagtagtggccagtcaggctcccatgggccttgacacgtgagatgtcaggcagaatttttattaatgaatctgatgccaattcagtatttctgcaatcacaatgcactttcgcaatatttatccaagcaatatttatccaacaaaaatatccaatatttatttatccaggatctcgcaaacgttcagtctagtttcactcacgtcagtgtctctaaccttcatactttgctttcaagcaagagtcgtgtgttggtctgggtgtccgaaggtgggggtggtagctggtgatgcaaggaaccaaaaattggccatacttacttacttaaatatttcacagctctttaacagattctcatctcctgctctcttctcttctccaaccttgccgtctggttctgacactgtcctgccacgattaggagtgagctttttggggttccctcaaacattcactcccagctggtctctttgttacctactcaagagcagttcatactgttggccactctccccttttttaaccctcttttctttggcttccatattcctgctattcctcctatttggttgacaattccatcccccatctctttatgccctcctttttctctcctcattctctaaatgtcagctttcctctgtgcactctcctgggccacttctctactaggctatcatttcttccaagccatcactcaggagccactccaatggcctcagcgctgccaggaagcgcagcgcatttaatttgaagggtgaaactgccttggagggatggcaggtgcatgcttaataacttgtttcccaaggccacataagtgtcattactggatgataattatcagctcaagagggaaagttctaagacagagaatgcaagatttctaaacaggtctaagacagttttccaatgtaagatttattatgtaacagttttgaaagtagtgtctgattccctgtctatatcctccagaacaatctgagggcatggttgccattacaatttactttgggggacgattttatagcacgtcttcacagacaacacgacaaacatctttgcttctgctacactgacaacctgaagttaacatttctgtacctatgtagccattttaatcaccccctaaactggttattccacagcccaggggtgtgggactgagtcagatgggctagagatacctttattcagaggatttagaagtttgcctcagagaaaggccatttctagtctccactagaaatcacacatatcttccaggaataagaatattctcttagtcataagttcaacaaatatgtactgaacaccttttctacttagaaacttgtctagctgcttctagattacatccatgacccaaaaccacaaagacacctatctgcataaggcttgtattctagcactacaagccacagataatttttgaaaatcaattaatcaaccaataattgatagggtaaatttataaccttgtttttcaagcctgatctcagggttagaaggtggtaagtgataagtatgaagaaacagaaggcagaactagagactcaggaaaagagaggtaaactgctgcttttcatttagagtggccagggtggtcctgagaaaacgcgaaggaggggagggtgtgagcccccatgcattcatgaagaataggccttccagccttggcaacagctagaacaaggccagagtggactgcgggggctgcacgaggaacaatgggaccaagaacagccagggaggaggggttactggaaaggagcgaaagaaagaaccaggaggtgaaccaggaaaggctgggggtggtagagccttgcaggccatggcaggaacctgggtgttgactcagagagaagtggagtctctctagccgtcttggctaaaagcccgggaattgtcttcttctgtgttgcactaatattttccatctcataagggttctgcaaagaaaattctttctatctttaaagttttattattttcaaaactaaatgtgatgagaatgcatatattgcatatgccatgtgtacaccaaaagccacacctaataaaatgttacagccatcctttgtcccacatgcaacgggaacttccattcatcatcacatgcagaaactctgggaactgagaatctgtacttttcattcagagtctgcaaggggtcacggccattttgaaaggctttgactcacacaggaaatacctcactgaggctcccacccacccatccactaatagggcagcctttagggaaactgacttgtggcaactgaaaggaataacggcaccaaagtattcccctgccctgaaatctctgtttacctgtggaccggtgatgggtgtgaggctgtaggttttaacgagctctgaatggcaaatggcagacaatggtgtcacttcctttctgcttaggaaggagacgtttggaaaaactgttcactgctgtgcttgcctatggagaacctggattcccagagctctatctggtagaacgtgtctccatattaataagcagtgaatcctcttttgcggctgaattttcctcaaggaagcagcatgggccttattactgccttaaaacccaatttcaatattcgatacatagtctgtgtattcatttgctagggttgccaagacaatgtaccacggactgaggggcttaagcaacagacatttattctctcatggctctggaagctggaagtcagagagcaaagtagcagcggggttgattcctcctgaggactccctccttagcttgtggatggtcatcttctccctgtctcttcatatcatcctccctctatgcatgcctgtttctgagtccaaattacctctttttataaggacatcagtcccactgaattaaggaccaccctaagggcctcattttaattggattacctctgtaaaggccctacctccaaataaggtcccactctgaggtcctgggggttaggacttcaacataactcagggaacactattcaacccataccatcctccaggaaggcagagaatgtgtccctcttcttcactgctgtatctccctgcctagcacagtgccaggtaccacactatgctctgtaggtcagtgattctccggagctctgtaggtcagtcattctcaaagtgttgtccaggaaccccctggggtccccagacccctctaagggcaggcataagcagatctgagaatccagctgcctccaattagcccagacattaaagagattgcaaaaaatgcaaaacaatgccacttctcattaacattttcttggaaaatagagttacttttcataaaaatatctcatttgtgttaacatgcaatgagtttatttatttatttttattttttgagatgaagtttcactcttgtcacccaggctggaatgcaatggtgtgatctcggctcactgcaacctccgcctcctgggttcaagtgattctcctgcctcagcctcctgaatagctgggattacaggcgtgtcccaccatgcctggctaatttttttttctttttctttttcttttttgagacggagtctcgccctgttgcccaggctggaatgcagtggcgcgatcttggctcactgcaaactctgcctcctgggttcatgccttctcctgcctcagcctcctgagtagctgggactacaggtacccgccaccacgcctggctaatttttttgtatttttagtagaaacagggtttcatgatattggctaggctggtcttgaactcctgacctcaggtgatctgcctgctttggcctcccaaagtgctgggattacagtcatgagccactgcacctggccttgttattgttatttttaaatgaatttataagtaaatgtttcaaaatttctgtttttgtttctaccaatagatataatgcatatacacaatttttttttaagaatcctcaaccaatcttaagaacgtaaaggggtcctgagaccaaaagattaagaatcactgccgtcgaggttttaagcttggctaggacacagtctgtacttactgaagtaacccacagtatgacagtaataagacactttatgaagaacatattttcagtagctaagtgtcatagaaaaggaagcttgttagccatttcctcaagttgacaacagagagtccttaggaaaataattttttaaagccaatattgagccttccaagactgcacatggtgatatgttaaatttggaatttatgcaacttaaaaaactgagagtcgggggttggcatttttgtgcatcctaactgacgagtgctgccccagggctctctaacactgcacacagtctactaaagaagcaggctgcccatcatgacccccacccatcagctacacagcacacatctgcttctagatgaaccttcttgcaagtggcctgtcttatggcaaaatcaaggggcaggcctgtaaagcggaccaggaaatgagcagcaactgcataccaccaacctgttgccaagctaactgtgcttttctggatcagaggcagcttgagacactggtccctggggctgagggactgcagagcccgggcacagactccctgcctatctcccagtgtgtccatcttggtacacctggtgcatctctggattggcaagtggcactccccaattaatgttaagggccacttgttttaaatataaccagattattttaatttttaaatgtgtatcccatacttggacactgaaaggtcctccctgtttacctgcttgctggggtctgtgcttgggtgtctcattttattataaaacagagtctcaaaggcatttaatactaagatcaagtggctgggcatccatcatgtgcagagcaggagcctgatggtggtgaaggctcattctgcatgtggttgactctaggaactactttaacagaggggaagaaatacactgggagaaaggagcaggagattcgtcagggctgggggaatactggctccatgagggcagagacttttttctattttttctctttttcagagcctgtaagtgtccacatatcatgcacatgcagtgcgtatttgttgcatgagctcctggtatgcaggtgccaaatgtcatgctaagtgtgtcgactggatgacagaagaaggaaggagggattaaaggaactggtgtgcactggcctgagccttgaagaatggggtgtactgggtaaatcaaaatggtggggagcatttccagatggagaaactgcaaggaaaagcatagaagtggggccacccctcgtgagctggggagggcccagggtatgtgtgctggttggggggaagctgaaactgaggaaattcccattggatccatagcctggttctggtttccacaggcctgggatgccccgtccagagtttgactttcagtctgcacgtaatccaggctttgtattcccacttcccgtatcccctcactcctttttcacacaccctttttatctatgatgctactggggtcatgggttaagaagtcctgtcgtctaagcagcaagggtgcatcaaagcaggattttctccattgattccaaggtgtgattcagaaatggtaaaaactccgaacactaggatgagcactggggatgggttcatgttttttttttatgaaataattcagaacttattaagaattcccttggcaaaccaaattaaatattaaacaactatttgttaatatgttactattggattctatcttagaaaagtgtaattatgtgtaactgaactttttgttttcttgtggttgaaccctgaattaccatgccttctggtttccgtgtttttcctggggaataggtcatatttcttacttccaaagcccagaaataaaagcctcacacatccatccgtagtcccaaaggcttttctgcctagtacccagagagtaacagcagtgcttcaaactatttgtggacaagaagtcctaaaacatcagacacactgtggaaagcaatttcatttcattaatacaattcataattaactgcatttattttattgtctaaattccaactgctaacctatcatatcgacgaattctttgaagttgcctttattctacaggatatgttcatttttagataatgctatttttcatatactttaagttctggggtacatgtgcagaacatgcaggtttgttacatagttatatacgtgccatggtagtttgctgcacccatcaacccatcatctacattaggtatttctcctaatgctatccctcacctaccctcctaccccccgagaggccctggtgtgtgatgttcccctccttgtgtccatgtattctcttgatcatctcccacttattagtgagaacatgtggtgtttggttttctgttcctgtgttagtttgctgagaatgatggtttccagcatcatccatgtccctgcaaaggacatgaactcatccttttttatggctgcatggtattccatggtgtatatgtgccacattttctttatccagtctattgttgatgagcatttgagttggttctgggttcatgttttaaaatctcaatttgctccctagtcctaggaatgatcttctccacctccaaggaatgcaagccccagtgcaacatggattcttcctctgtaagaggctagactccaaataatttgtcctgtttttgcctgtgggatgttacaagtgtaccctgctgtctgtaattgtgtttctgaagtgttctatgtaagtaggtttttgttagttgaattgtactttaaatgtgccaatcaagttccccatgaaaagagatgggcacagagactttttgaaaaattaagcatcccaagagaaaagccgatctgaaaagactacatattatatgattccaattatatgacattctggaaaaggcaagactacagagatactgaaagatcagtgtttgccaaagattagagggagggaggggtgaacaggtggagcactgagggtttttagggcagtgaaactattccgtataatcctataatgttggatacatgtaaatatacatttgtccaaacccacagaatgtccagcaccacaaatgaacgctaatgtaaactacaggcactgggtgataatgacctgtcaatataggttcatcaactgtagcaaatgcactccgatggggaatgttgataatgtgggcaaggctacgcaagtgtaggggcagcaggtgtatggaaatcactctatcttcctctcgggtttgctgcgtactaaaattgctctgagaaataaagtctattttttaaaaaatgaagtattccaattaatttataagttttgccacacgtgcaatgacggccctaaccactttactttggttctccgatactgaatatgtcactgtgaatatctcatcctccttgatcccatccccatcaaaactagagattgaaataaggagatgagatggccctccctgaccgccttgtgcctttcagaggaggtgcctgggctggaatggggaggagctaaggactcctgtgggattctgatgctgggtgtgaaactgtctgcagttagcacggtgttggagagatgagtgctagactttgtatttctggggactagtgataaatgctcattattatttatataattttaaagctacgtttaaatttgtccccagtactagagactttaatgttatattgaaataatacataataggctgcaaatagttatattcttgtcttgttgttgtccatgtatcagcattcttgtatgaatgaaactagaaccaagaagaaaatccatcactacaataatggtccatacattaaaacagtttaggctgtctgatggtctggggtgtgtgtgtgtgtgtgtgtgtgtgtgtgtgtgatatagatatgtatgatatatatgatgtatatatgatttatatatatataaatcatctcatcttgctcaaaacaatatcactcttatttaggtaggcacactggaatatgattttaattaattgaaaagtacagtttgtttcacatttgcaggagtggtttaattcctacacagtgtactaagatggcctctcgtgggctcatgatcctggaagatatactcccaaagtgagggggggtctatgttggaagcaaaaataaaaggaatttaaagaatgacaggtctgggaaattattcttatggatggtcagttcttcatatgataaaatagttatgacaaaccaaacaggcacagtctcatgtatgcactgatttgcatgaaccaactttacagataattgattcagttggttggaactacagtttcttccaaatgtggacaacttacaacagggtgggagccccaaactgtgaagtcatgtgaggtcatatacaaactgaaaaacagggtttctctactggaatgataatcctaccatgttacacttttccccaaaatgaaatccaacatctttcacctggcgtaagaagcccaacatgttctggcccctagaaacccttacatcctgcaaagagggactagagcttgttactcttattagctactcttaaagtcacagaggtagttaatttggcaaggagtggctacaaattcaagacatgtttggatgtgctgagaatcagaatccaatctcggccctcaagtcatgggttaaagacttggttttttatctatatgaggtcctaccttgtagttcaagcagaaacatccaacaaatgaaagcagaaacaacatttgacagctcaaattcaaaagcaagaggcttgtcaatgcaaaagtcttgtgctgcaaatgtttcaagggaagtatccatactctgaagtgtgcaattgaaagaatgacctgatattcttgcactgttgcctcaaacaaacctccctcctcctagctagctccggatcttttatgcatcatatagtacatcttcccaaaaaagcaggtggaaaccaaagtgtgcaaaaacacacattttccaagaacaaatgcattatactagcaagttatgtgtggtggggctaggtgcttctgcgggtgtggaggaggaggagagaaagaagggtcaggaggaagtgtgttgggtacagagacatggaaataagaaacaggaaccctgaaagacacacccgcggaggttctgtaactgtacatgtgctcttgttaaatcgccagtttcagaggactcagatctgaggccatatagaaatctattaatttgcatcttgactttggggcttccagtaacagtaagtatttgtatttcaggatccactcagcagaaaggccatacatattcaagtcacataataaattggtgaattccaagtgaattgtgaataccaaaaaagaaaactgattatgtgactttctggaatatgatgtagaaattgacctaacaaaatgtatatgcacacttacggcatgtgtgcatgagggtgtcatttatgtacacaggtcatgtgcacatccaactcatggccatgcatgctgtagcctgttacccattctgggagatatgtaagcctttgtctttctccctccagcttcctgccttcttaaaacatttcactggtcatcaaccaatgattgaagctgggtgcagaaaaggagaaaaggtgaaaactcctcttagtccacaaggtgacgtgttagtgcttcaagtgaaagggctgtggtggagagccagagaaagcccttaggtggaatgagactgtggttcctataggtcggcaccttcctccccacccggcaggtcagctcatcaattgcacttatctcccagctgccacagcctgtctcactcctttctctctcctgttgggctgctaccaggcctggtaaactattccgtagctctgtgcaatagaaaatagatatgtatttctctgaatatagagagggaaattggagttcacatggaatgcatactgtaaacttatttgttttctgaaagcaaaaattaaacttgaaaggagcaaagcttttcaaatttcccatagtgctggcctcaaatcctaaagatttttttccttgacaagaatcatgggatgaattggaagatctggatgctccattcaccacagttgatgatgctaaaacccatgtgacagcagaggaaagaattgaacattctaaagtcccctctggcaactggaatgccaggggagccttcaccatatacctcatcaagccaccccaacaaacctgccatgtcggtgaaaagaccatgctcactatgaaaatgtggcttctgccgggtgcggtggctcacgcctgtaatcccagcactttgggaggccgaggcaggcggatcacgaggtcaggagatcgagactatcttggctaacacggtgaaaccctgtctccactaaaaatacaaaaaattagccgggcgtggtggtgggcgcctgtagtcccagctactagggaggctgaggtaggagaatagcgtgaacccgggaggcggagcttgcagtgaaccaagatcgcgccactgcactccagcctgggagacagccagactctgtctcaaaaaaaaaaaaaaaaaaagaaaaaaaaaaaagaaaatgtggcttcaagaccagaactctagccctttgtccaaaaaaaaaccatagcccccgagacccctgatggccttgacatgccactgggggtccccttatctatttacattatagaagggcttctaagaagaatggtttcagtcagagaatccaagcaacttatgctaaagtccagcctcatcctcagaactctgggcatgcttgtttttaatgccatgtctatccatctgtgactcattaacgcacttagcaaacactgagtgactgactagtctatctctccccgtgataaaatttaaacgcctcttacaagacatgagtagtctacctacctgttacttgtatgccattacctgaaaaattcccatctgtttggatgcaaacttcacagaaactctgccacaaatgctcacgaacaccatcacatgggctgggctctagtgctttggaatatcctactttcttagaaaaatcgatgagtacatataaatataattagctgcaccttgattcctgcggaatcattgtattaactgctttgggctattctccttctttcctttcaggcaatattaatttgtaacaaacacattttatgatataataaattatctttcattttttactatcaaatacatggagaagtaaaaaaacaaaaaacccagaacttctaggcagctcttaaacaagtcttgctgttacttggaaaagtaacaaattcacaggtttattgtctatgttaataaagctgtgttggagtagtcattataaccttttacattccctcctgtttacagctcacagaatatgtttacacatgtgatctcattcagttgtaacatgatctgcataaattatgggtattaacacttgccatatttattacaacgatttccccagcaatttgtcttcttaattgtataatctatattgcaaacagatgtctgcagtttgtatatgcagctatgtactcctatggtttatgcatctacctcaggccattaaactgtaagctcctggagggcagggatgtatctgattcatttctgtatctccggaacccactgcacagctgctgaatggatacacatctagttacttaacctctgtgtccttcagtttcctcatctgtgaaatggctataatgattgcaggaacctgtcttctctgtcccaattgtattaagcaaaacacttaatacaatgtctagcatataataagcactctatgagtgttttctattattattattattattattattgttataattatctggagttaattgaattaaagttcaaaaagatgacctaactcatttgggggaaggtgatgaataaacggcagaaagaaaggaatatcagggatcttatatgctgatcctagctttgtctaatctgccaagctaagtcgtaagatttttctcttttcaaaatacttctgttaagctagtaaaaattatttacttgtaaagattccatgtgctgctttttctgtcataattgcatttaccttaccaaatacatattgaccatctacacagtggatagcagaggggccacagaaatgagtaaagtctagttcactctgcactggtatctcttttcttccatatttacattttataattacatttgtcaaactgcttcacaggcgaagtcctggaccaggaaccaaataaaattgacccagctttccgaccatggaaaactaaaagtataatcaactttggcaccattaaattctgtttcatttattttttccaagagtctattaacattgtcatacagaagtagaagatttaattgagtgtgtgcattttgagttgaaagcagatactaacaagaaaagctaacctggaagacatcttgtaaactgtttcatcagactggaccaggagccaggggagggtcgaggtgactcagggctgttggcaaagctgcagaaattgccactgggtttctctgtcctctaggcaacctaggctgcattggctctctggcctattattcattacggtttagttcaccacagaggttgccagtgagcagtgcataagattagagattttgtaaaaacatgttaatttgtatgaagacgaaaattggactatggagtttagtgataaaaatagataaacagttctgtcatttgatttaaatattaaaataagacaagacaaagcttttaaggaaatgaccacttcttggttctcaactagaggcaatgcctcttctgtcctgagcagatgggtgtttgggaatacgtggggtgacttgggttgctgtgataatgcaggggttctctggcaatcagagggagagggaggggcaccttcaaactgtggtccagatctacacaatcaggaaaggctgttcacctaaaattcaaccttctgttgagaagagcaacacttacggagctcatcaaagaacgacaaaccactggaacagttcttgagaccaaagtctcattcactctgggacatatccagttacataaatcatttatgttttatcccgtctctactttcccaagaaaccctgccacacattcatagtgaatatcaaacctaattaaagatcctaagcagctgagaaaattactcaatgaccaaactataattagtcttctacaagggagaaaatgtattcaaatcattgcttaattttgtttcatttcctcttacctgcacttgaccattaagatcaaaagtctgagaatttgtggccaaaaaaaatgaacatgagtcaaagtcacatctatttgttaataatggaaagtaattccttttctaattacacgtgaaaatactagtatccaacaaacctatttgtggaaaatacggtttagattgggaaggttaattactttcaggtttttcaatgtccaaaacacacctcagaactaacaggctcagacaagatctttatgagatcactggatcctccctccaaaagcttccccctcccctgttgatctctattccatatgctgcttcatttgatcgtatagcgtgtatgatgagcctgaatgcgggcatttgttgatttgagtattacctgaaacaaaagatacaccagaatgtaaaacccaggagggcagagactgttttcccagaacctagaacaactcctggcacataccagatgtaaaatcattgtagaaagaaagaaagaaagaatgaaagaaaggaaggaaggaaggaaggcatgaaacggtgcactattattgtatgccaccttaagtcactcatagaaaatactgcatgccagcactctatgcaatgggtgttacactagccattatgtaaagtcaatgacgggattatacgctgggcactttataatttaataaacacccttcaattaccgtctcatttgctcctccatgccactccacatagtatacgggacatattttaggatcaccagtttagagataaagacagaggttgtgtccccaaagtttgcttgcgagtgtggtatttgtaacttctaaaactctaactctcccctgaaaacacgtcctaagagtggtgaggctcccacgtgaggtggcaatattggttacccccgctgagctcatcacattgcgcaggcctccacagggcagctacactctacgataaggaacatgaagccctgagagtcaggagggagaaaaaagaaaatgaacgtttggaaaagggcattcccaaatcacaggagaaggggaagaaacgtgtctcagctactaagtttctcttttccatgacgctcaaagcagaaaatggctgcacgtgggcaattcgtgcgcttggagctcagacctgcagtcttgtcgtttgtctgccctgtcttggtgcatgctgggcctgacttttttatttttccatttcaaggagccccagcagggcctggaggaaatgagttttgcagcccatctcggcccttgagcttggctcctcggctgacctcggctccccgcctgcagacccggcatgaggcaggcagcaggcactgcggggcagaacttccgggacctgcaagaccagtccgctgccttctgagacgtagttctgaggtgtagcaagttttcattttcacagcataaaaccgtctacaaatacatacttcaaaatgaaatggaggatgcgctcaaaaaaaaaaaaaaaaaaaaggcttagagacacgtcaaaagggcacaggagctcagccaggtcaaataaattcccaaatttgactcacatcacttcagcctcatctggatattacccacactctgcctaggcaggcgaagcttccgtgggatcctctgtctttagtgaattctttcctttatcttgtccagcttttcattgctctttcagaaactgagcccatggttttaaatcttaatatgaccttgcattcaattatatatatacatatatatatatatacaaagctgttttttaaagacaattttaaataagaaaaaaataattattttagataccagagagtggtgaaataataatgattcaaacttaatcctcacttcacgtaggggaaattgactcaaatctgggagcatcaaaaattaagatgcatttacaaatcctaggagaagatatcctttgtaatctcagagaaaataattgagagagggaaaattttttttgaaagacgtggtttggacatattactattttgtgaaatgaagttaaatgtatggtacagatattaaagttcacttaagttttatctatataaagtgtgtgattttggatctaaacaggcataaatatatatatgtgtgtgtgtgtgtatgtgtacatgtttgcgtacgtatgcatgtgtatgtgtacatgtttgcgtatgtatgcatgtgtatgtgtgagcgtatgtgtgtgtaagtgttgtatatgtgtgtatgtgtgtgtatatgtatgtgtgtatataataggaagtaagttggaaaacatgagccaactgacttttttttccttagacagctaaagaagagtggttagaagtttactcacaagtaaatcttttaaggagcgtttacttcccagaaacagcaatgagatcttggaggggcaattcttgtcaactgtgcatcatcaatggagtttaactgtgagaggtaaaacccattgttggtcccgactccaccaacccaaatggtcatatctgaggacttcctgtggttctcccgcccccaccctctccacggcatttactgctcctgtataccctggacttctcgacaggaaatggcaaattcctcagtaggaaagccaagaagtgggaggtcacatggagactggaagttcattgcgtgcagcccctccaggtgacaggcgacaccgcctctgcatgttgagtgcctttgtgacacatgatctccttgtctcatgaccacaggcagcagggtcctgatgagtgccctggagagaactgtcctcccacccctgggtgacacagagtctcagaagccagcagaggtgctgcaccaaaggctcagactttcaccctgcctctcttctcctcaactctttgccctaaaaaacatgtgctttgagggtgtgttgaaaatctcactaagtcaaatgatgcctgtggggcagaaataacccttgctctgaaagggtcaccaaaaagtcatgagactcctacctgtatggaaggtggtgactatatagcccttgtataaacaaacaaatacggtgaaagacttggctccatttttttttttttgtctgttcgttattttttggagaaaacgttgtgataagaagcctttagcctacaaaaatgtctctagattaatgataatttatctcacttttctcagtgaaacagatgaatcaaagaaagtgaagcatcgtagacaatataggaccttcctgataacatctaacatttaataacgtgatcacagcgtggcggctctaaaagacatgcacatgtgaattaatgcatctaacctgcacactagctaccattatgcccattttaaagatgaggaaaactgagactccaaaaattaaataagttgcctagagcatcttgccagttaatgcaccagaattctaagccagctgcctggttccaaagcgcatgcccataaacgcggaacataatgcaccaaatggcctagaactgaaacgactgcaaaaataagtcaacatatgagaaactagagaatatataaagccagccccaccataatcagtggcaagggatgggagatgggaagaagggagaagggaagggaagctaaataatttcagtttttctctgtgcctttaattcctgtcccctgaagatgacacgctcattttagtagcaacccatgaccaagatgcattccccaagcttttcgcacctgacagaaagggactcggtgtccaggactgtgcccgattacaatcaaagcagatggacccttccttagggtagggctgttcttctgacagcctcctctgtgaaactagattataagaggatgtgctgctctcagacaccctctgcctgtccccgccttggggtccttgcctttgccattcccctggtccgcatcactcctccgaggcatttgcaaaccttgttctcaccttttctttgggtctctgtctgacaggccttgcctgatcatgttctctaaactagaggtcccgccccccggccacctggctctatcatgttccctaccttccctcctaaggctcctgacttcctgccacactctgtcttcgttgagctgtgatctatttgtcagtctcccccatctgcatccccctgattgacagcactgagtgagcccagctgtcctgctgctcatgcccctcagcacccatgagcctagtgggtgcccagtaaatccttagtgagtaaatgaatgagtcaatttccacacaccaaatcccaaagggataaaaagacattgcctttctgccatttcttggaagaattttttgagacaaactaaagaaaggaagctacttgttattaaatttttaaaaatctgcctactattttcaggcaaatatgtcatgatgacatctatgaaatctctgaaattaaagagaagcctgacgtttcacaggaattaaatgaagttgctgcatcacaggtgctccctgccacagggctccgtgtggcagcagcaaacagaactcctcgctgcttaggtgtagtccttaggaatgaaaatctgaacgtagtacgttaaaaaaaaaaatcttcaaaagcaaacaaagccctaagtgtcgctgtgtattatcagggcagggtcctcctcagagagaggcgggctgcaatcgcccctacacctttcaccaagtgcctcgcttcaggggtcccattgtctccacgtttaggtttaggagcctggctcttcgtaacaccagcgaaacatgttctcctaaagatgttccctgagatacaacaccactccgcattgtttcaccacataccagcattaatatcccagagtaatccaccctcctcttaacggctgatgacggctccaatggccatgcaaaaatcagttgaaggaaagggaagtcttgtcggaaatgagattagtcttgtaacgagtgttcagccctgataacccatctgggcacagaactgcttaaactggagagcaattaaccttcacccgacaagctctgtccaaccgttataaacattaaagagacagaatccttcccccctccttgtagactaaacaaccagatttgaaattccacgtaaacggcctctttctgcagatgtgcaccaacaacaacgtttagggggaaaaggtgggcaatggctctgttcataactctggtaacttttggccttggtgtgagtgggctgaggttattagcgtaaaaattaactggaggtatttccaataaaatcaccaggtttaggggactggacatagttgctttcatgcagaaacccatgtgtcctataggaacacaacttgatgcttgagagattcttttttcttttctttctttcctttttttttttttttttttttttgagacagagtctcactctgtcgcccaggctggattgcactggtgcgctcatggctcactgcaaccttgacctccccaggctcaggtaatcctcctacctccacctcccaagtagctgggaccgcaggcgaaggccaccatgccccactaatttttctgttttttgtagagacaaggtttcaccatgttggctaggttggtctcgctcaagcgatccacccaccttggcctcccaaaatgttgggatgacaggcgtgagtcactgcgcctggacttcttttttcaacagtagaaatatttgcactgggctagactctcactcactcccaattcctctcttccgacatttgcatgagtgatgctgcttgtggtcacagaagggagattttttttttaatctccgagaagttattggttttcatggggagcaaacctgtgatcttgcctttatcagcatttgccgtaaccagtcgagttaaccaagttgggccatgtgaaataccgagtggttagagaatctaccaggaaacctactgttaaaaataactttcacaacactgaagagaaatagctgaggtcacttaatttatcactcaggcatgagctttctttagcatcagttcatgctgagccattggcttgtttatggacatgatactaacaataaataggtaaagggtaagggccctatgacatagagctggctacaaaccaatgtggggtacacaatatgcctagcatttaaacaagaaaaaaatgtaaagtacatgcagaaagtcatatgagggaaccaaacctctatgttactgacctgttaatgtgactgcaactcagatttttttaaatagaaagaaaaaaggaaaacatatatttagcatgtcctaaacaaatttatctccccaaggttttagtgcaatcttcatgatgacctgagatagctatcaaaatagtccatcctaacattcgatcttatctctcccttgaacccagtttctctttttccagtaggtaagtcataatactccaggcctcagagacgtgtttgcacacaacgaggctgagcctatctcacttataaggatgacatatctcactcatgctggactccagaccggccccaataacagttttggagagtggcatggtagaggatgtgtgttacatgggaagtactactgtaccctgggacaagatatcctggcaacaggtcttgttttcatggtttgcatttacatgcttaactgttccttttcctgcctttgtaagactaagaaaatccttactgtacagagaaggaactgtgaaaatagagcaagtgggactgactctcacattgcagggatatgcaccatctccatttttgcagccaaattagatgcaagcccaggattccactggcctggttctcccaggaacactgggagtttcttggtgtcttagcttgaggtgaggtgaagatgggctatgggcacgtgagctgaccagtttttcatcctgtgtgcattggacgtagacaagggcacacacagacatgacaagaatccatgacctagctcctaatgtaaatcttctttcccaagacaatcttgcagagccctcatggtcagtgataagaggaacttcaatttttatttggaatctgacccatttcataagaatgagtaacacctgaatatttaggtgcagatatcaaagacagaagacaaaaagaaatcatagtgtttgacaataatattagtataggatgccgttttatgagttcagtcttaggactgtgtaggtgcaacgtgaagactttcctgaagacagccacatgaatcatttttcataggatgtaatcaccactgtcatccattagtccaggcttgacacatagaatgggggtgactggctgcctaagtaacaaactccccacgtgtgcttctgacgaactgtgtgggctgccctaagcttttgcatgtctcgacacttaccaagtaaaatgatgagataaggaaaaccacaacatcatactcagtatcttgtgaaactgaaatggttgcagagtaaacactttgccttacagtgattttattttgactattatgctggatttaacaatataatggttaatatccatgctataaagttttattttttcatcaacaaaactaattgcattggcactttcaaaatgttgtttgcacataaatgatttatacttaagtatgagtgtaacaatcttgccatcaggacctggtctgttgggagatatcagtgaatggagcctggctcttccaatgggcaaccgttgtttgttggtgaagctgccacccttgagacctgcctggtctccttcccacctgtagctggctaagtagtgtctccccacaattcacgtccacctggaacctcagaatatgaccttatttagaagtaggatctttgcagatgtaattaatgattaaaatgagatcatagattagggtaggttctaaatccagtgagagcatcctcataagaggctgagcaggacacacagaaacataaagaagaaggtcgtgggatgacaaaagcagagacggaagggatgcatctacagcagtctccccttatccacgggggacacactacaagacccccaggggatgtctgaaacctcagacaggactgaacccaactgccattaactggaacactttctgttccatccacaaatgcaataccttttccatcttaactaagcacttactatccactgtggtcatcagttttgcagtttgaggtgcaacggcaaaacaagcacagatttctttttatttcttcaaacttcaaagacagaagattcattcttactgtacatcttagcaaccacagcatatgatctttttccttgtaagtacagaactttcaccttttcactgaaagaaagcactttacggcttctctttaacatacccggaattgccaggatcagtcctcttgtgccttggggctactactgaataaaagaagggctacctacacataagcactgtgataccgtgacagtcgatcccataaccaagagggctactcggtgactaacaggcaggtagcatctgtagcatggatacggtggacaaaaggggaattcatgtcctgggtggagcagggcaggatggtacaagacttcatcatgctacttagcatggtgaacaatttaagacgtatgattcatttatttctagaaatggccatctaatatcttcagacagcagatgaaactgccagaaaccatggaaagtggaatcgcggataagagaggactactgtccaagccaaggaacacagggcttgcaggcaacccccggagctggaggaggcaccagatgcatccttcctcacagcctccagaagggaccaacccagccaacacctcgattttggatttctggactcccaagctataacagaataaatttctcttgctttaagccactaggttgtaataatttgtcacagctatcctgagaaactggtaacagtacttgtggatgctgtttttaacaaaaattttgccactttagggcactatatggcctttttttttttttttttttttttgccttatagagttaggtcaatttccaaaagtgctggagtttatgccaagaattaagtgactccctggttgcagtggccaaatagcctgaaattttcaaagtaatactaattttgcaaaacttttcatgtaaactcctttgcctgaccatgccctaatttttgtgattaggaaaatctggctcttatcccactggaggaaaagtgtctagttcatattctaatggaaatcatcacttgggaggtgttttgacaaacatctctcagttttgtttaaaaattatgttagaaattaagaaaaataacgaatggaaaacaaaatctaatttttggtatattttcctgctaacatttgtgggcaaattagttaaattatgattgtttcatgcatacttactcctccaacagcatcctagctctcttaggagttccttttaattatcctaaaaacagttaagagtatactgagccaaaatataattaggttgagaaacaatgaactcctaaatgaccaatcaagttttttccaacattttaattctcaaataaaggtcatttccttttatttgactccttaaaaactagattatagttcttctaggagaggaaccaagtcagatttcttttaatcacatacattgccaaatgcatgctttactcagggaaagatttcaatatgcatcatttattcatgcattcattcattcaggaaacagagtagcactttacatgcggacgctgtggaaacaatggtgatatgaattcttaaatgattaaagaaacagtccactaaaaatcttatcaagataatagaatacttcagattttatgaaagattacattttcattggcctatatataatgttttaaccagtaaggctcactaagttaaataatatgctggataatcttaaatttacagaagggttttcagttttactatttggcttagataagctggtagttacttgctaaaattaatctttattataaagcagatcatcttgaaactgaatacaaaaacaaacgtagctattattgaaaatgttatgctatctcatatccattagagatgttatttatataataagtactgtgttgtaatttgcctgattccaatgaatacagaaaccctcagtgtgaatcaatatactagacaccagcagacatatttaaaagattgctacagtttcactgacatttcaaagaggtgactgtagtaacaaaagaagaaaaatgaatagtccctatcatagcacattaatacaacttgtcactagttcatgtccagaaagacttattatataatagattgtcaaagttgaatatttcaatgacccaatgcaaatcctggataaatgctggtaggtgttgctgctcaataaaaatgaaagtggtgtttggttttgctcatcaaggcaagtgtcatgtagcaaaatgcaggctatgggttgcctggaaactgtattcctgcttttaatttacaagtgaaacattcccatccatggcctggaagggaccatcatgtactcggcagcactcattagattctgggcagcccccggtcatctgaccttcccaaacatagggaaaggacgtggatagacattttcccaaaaagacataataatgaacaatgggtatacgacaaggtgcccaatatcactaatcatcaggaaaatgcaaatcaaagacacaatgaggtatcacctcacgcctgttcagatggctatggtcaaaaagacaagaaatagtaagtgttggcgagaatgtgagaaaagggaatccttgcagactgttggtgggaacatggaatgttgcagacactgtggaaaaaagtatggaggttcctaaagaaattaaaaatagacctaccatatgacccagcaatcccttttctgggtactttcccaaagaaatgtaatcactatctcgtaaagatacccgcagtgccatattcattgcagcattactcacaatagccaagatatgaaaggaaccaaagtgtccatcaatggatgaatacataaaataaattgtggtggatatatacaacggaatatcatttagccttttttttttttgagatggaatctcagtctgttgcccaggctggagtgcagtggcatgatctcgactgactgcaacctctgcctcccaggttcaagtgattctcctgtcttagcctcccacatagctaggattacaggcacccacgaccacaccccactaattattaaatttttagtagagacgggctttcaccatgttggccaggctggtctcgaactcctggcctcaagtgatccacctaccgtggcctcacaaagtgttgggattacaagcgtagccaccatgcccggcccatttagctttcaaaaagagattctgccaattgccacattatggatgaatctggaggacgttatgctaagtgaaataagccacacacagaaagacaaatactgcatgatctcacttatatgtaaaatctataacaaacaaacaaacaaagactcaatggggaaatggggagatgtaggtcaaagaatataaagtagcaaatatgcagggtgaacaagtctagagatctaacgtacaccataagggatatgcttaataataccgtgctgtgctgtacttgggatttttgctttaagagtagattttaggtgctcttgccccacaaaaaaagaatgtgtaaccatgtaagatgatggatatgttaatttgccttcactatcagaaccttatcaccatcttcatgtatatcaaaacatcatgttgtacaccttaaatatataaaataaaacttttaaaaaataaatcaaaaagtcatagttcaaaccactcttttggaaaagtatggatttgttaatataagtggtatataacaattgtatatgcatctggggaaaatggactccatctttcatgatataaaaagcaattctcggccaggcatggtggctcacgcctataatcccagcactttgggaggctgaggcaggtggatcacgaggtcaggagattgagaccatcctggctaacacggtgaaaccccgtctctactaaaaatacaaacaaacaaacaaacaaaaaatagccgggcatggtggcacacgtctgtagtcccagctactcgggaggctgaggcaggggaatctcttgaaccccgggagagggtggaggttgcagtgagccaagattgcaccacagcattccagcctgggcgacagagtgagactctgtctcaaaaaaataaaaaatttttaaaaaacagcaattctttgtgattttaatatagggtgccagccacatcactgattcatgcactcactcatgcatttgtcatgcaggaagttatttattcatttatgaaatggacatttactgatagcctgctttttaataggcaccatcagcatgactgaaaggttacatgacaacagccacagaacttaaggcatagaactttaacaacacacgttttgagttactggtcttgacgcctggctaattttttgtattttagtagagatggggtttcactgtgttgcccaggctggtcgtgaactcctgagctcagacaatccacccgcctcaacctcccaaagtgctgcaattacatgtgtgagccaccgcgcccggtcggggttctatagattcttaatcatgattaaccagcaatatgataattcaatagatccctgctcacctcccctaaagaatgtgccactctaagtagttggttcaaaatagcttgactttttaacctctagatccactccagagaacagtggtctctccccattgcacaaacacattcatttatttaacagcatcacccaaagcataagaatgggaggaaacaatgaacgtccttcatttctccaactttaaattatcaaaactactgattttctgggctcacaaaaatgcagttgagttcagctgttgaaagtttggttaacatgtcagttgagccaccaaatggaataacagttgtaactctcttatgttttctctactgtcctcaaaggaatagcatgagaacaaagcaattagcatacattcaggagttgcataatgatgttttggacaatgacagactgcagataggacgagggtaccataagattataatggagctgaaaaatctctatggcctagtgacatacagctgtagtaacactgtagcacaatgcatttctcacatgtttttggtggtgctggtgtacaaacctactgtgttgccagttgtataaagtatagcacatacaattctgtacagtacataatagttgataatgataatagttgactatgttattggtttacatatttactataccatacttttcatcattattttagagtgtactttttctatttccaaaaaaaaaaaaagttaattgtaaaacagcctcaggcaggtccttcaagaaggattccaaaataaggcactgttatcgtaggagatgacagctccacacagattattgtccctgcagaccttccagtggcacagggacaagatgtagagatgaaaaacagtgatattgatgatcctgaccctgtgtagacctacgctaatgtatgtgtttgtgtcttagtttttaataaaaagtttagaaagttaaaaaaaaaatagaacaaagcttattgagtaaggatataaagaatgaaaatatttctgtacaactgaaccacatatttgtgtttcaagctaagtgagtacaaaagagtcaaaaagtttaaaaaattaataagtaaaaaaagttatagtaatctaatatgaatttactattgaagaaatgttttaataaatttagtgtaaatatacagtctttttttttttttttttgagatggagtctcgctgtgtcaccagactagagtgctgtggcgcaatctcagctcactgcaacctccaactccctggttcaagggattctcctccctccgcctcccaagtagctgggattacaggcatgcgccaccatgcccggctaatttttgtatttttagtagagatggggtttcactatgttggccaggatggtctcgatctcctgacctcgtgatccgcccacctcggcctcccaaagtgctgggattacaggcatgagccaccgcgcctggccaatatacagtgtttataagtctacagtagtagatagtgatgtcctaggctttcacattcactaaccactcactgattcacccagatccacagccactttccatcctgcaagctccattcatggtaagtgccttatacaggtgtacaggtgtatcatttttttcccttcttaataataataattattattattttgagatggggtctcgctctgtagcccaggctggagtgcagaggcatgatctcagctcacagcaacctttgcctcccaggttcaagcaattctcctgcctcagcctcctgagtagctgggactacaggtgcgtgccaccatgcctggctaattttttatatttttagtagagacgggatttcactgtgttagccaggatggtctccatctcctgacctcgtgatctgcccgcctcagcctcccaaagtgctgggattacaggtgtgagccaccgcacctggcctctactgcattattactatacctttcccacattttgatacataaaaaccattgtgttaagtgtcacaattgcctacagtattcagcctggtcacatgctgcacaggtttgtagcctaggagcacaggctacacttatagcctgtagcctacgtgtgcagccggctatgccatgtacatttgtgtaagtgctctttgtgatgtttgcacgatgaaatcatctaacaactcatttctcagaactgaccgggcatggtgatgcatgactgtgtagggaaatactttcacccctttagaagaagctataaataaccaggtataaatgcaggattcctttccaaagacaaatactggaaacaaacacaatcaaggaagataattgattacttcaaaaaaacaattgagatatgagagtaaattaaataagaagactgtgactaggataagtaaccaataacagcccataacagctaacattattattattgttgttattattatgagatgaggtattttgccaggttgcccaggctgacctcagatactgaggctcaagagatcctttgctttggcttcccgagaagctgaaactacaggcagctgccagcatgcctggtctgcaatttacatcttttgtacactacagcacgttactgttcaaagcacatacaagtattaagctgcttaatccttgcaacactaccaagaagtaggagttattatcatgactgactctcttctacagatgaggaaacgaggcacagggaagtgaaaggcgtggtgggacagggacctgcggtctggatctgcttcatatagagaaactgggttcttaagaaggaaaatgggccttaatttctaaatcgtaacaagttcagccctcactcctcttttttttttttttttcactatcctggaaaaaaaaaagaagtggatagaaaggtactaataacaatgagtttaatttctcaaattttattattctttaaaaaggatacattggtacaggagtaaagacaaaaaaaatcaaaaaagaatcgagtattcaaagacccttgatggtgtaacatcaattattttaattttgtttttaaaatttttattttctaaactcctataataattgtttttcaaatggggaaaaagaacgaagtttttattactgcctttctttctacaatatattattcaatggagatactgaacctgtatttgctacaggctaaagaaaataaaataaaacaatccctagccaggcaagggagattttcagagaggatgccaacagggtcctatcccatcaggcatccatgacaaatctgtctgctgtctggtcctgtagcatcacccaaatgtggttcaggcagcactggaaacaatacagactcaggagatcagggaagtcattttgcaaagaagcagaagtgtcaggaggtagcacctgtaaggatgaatgctggagctgtctcatggagtttcacagaaaggtaacaagctgcacaatgactgtctaggggcaacagatacataggaggaaagcagtcttcattcaaacaggatactgagattgacatagtgtgtcttccaacaagataagcaaaagtatgtgaagaaatgagtccctaaaggaaaatatctctttgggcaatttcacttcaattcaatttcatgttaaatacaaaatacatatattgaatatgtggataaaatcactagaatatattcgtgcaataacatctacgtgagacatgacagcatctcaccatgtctggcagtctctcggggtcaaatgcaatctctgccccccacctggcagtcatcggcacttatggaataggccaggcagaaggctctgttagatactgccttcttcccttcgcaatgcactgtcccagacttcctggggtgagagaagtgattgtctatgagagctagcttggagtgaatgaaaacagcatttaagaggctcagcattttctgatcgccaaagggggtacccttcaacatgaggtgacccagcaatgattggctgctgagttctttgagtattttagggacctgcaggagatctgggtggagctgtgggtttccgtgtgtacagtgtgtaaacatcaccctttggtgcttcgccagtgcttaaggggctcccaggtgctatttattttgtttagtttattgttcagtgttattgtttgttgacttgatctatttttttttctcctacaaaggggccagtctgcaaggacacatcctgtagatggctaattgatgatgccctattgtttagtgtgtgtgcactgtggttttatttgcttcggttcaaagggcctaaacaatgcattcgttggaatttagtaactgctgtaaaatcagcacagagaacaatctgtgagctgatattttttgtacccaaatctggtaatctctgcttgactaaagaaagcaaaatctaaaatgacctttcaactaaccatagaaaaggccttccattgaatctcaaagagacttatttttctaccaaatataaaaacattcgaattatgcatcattttccatgattcaaaggagacagaggtgcctacggggcatgttactcatagacaagtctattctagtctaatcacgtccccttaaaaatcaccgagtagatgacaccgaggatgagaacgaggtactgtaatcattactttagaaactttatatttttacctgtttcaagacagaattctcctagaaaatctggagcaacaagcttattccccttggagaggagataacgaataatggaccacgcattcggagagaggaagtttccactgggagcccttcctgcatcagtgcgtctctggttgggctggctatctgtgtaggaagtgaacgcaggaagtatctgtctacaaaccctttatcctcaaggtaattgctgtagcagcattttactgtttaccaaagcagtaaacatgtgatctaaaaaaagatgttttccatctccagaagaacaaggctttaaaaaatgtatacatgtgcttattttgtaaccagcttatcaaaattggttacaataggcttgggctttcaacagtgagtccatgaaaacagctcttgggatggacagaggtaccctcacagggatgcacaagaaacaaagaagtggcttccttcactagaatgctatcctagcaacacacattttatgtcttttctcctaagaccggcttaaccgagttcatactgtttggcttacaaagaaggtaaagtcaacaaaactatctatgttaattcaggttggtagaatgagtaattcacaaagtccaataactcataaaagtcacttacatttggccttggacaatattcttatttttacgtgactataaatatgcttccagtttaggagttcacacaagacaaagtgaaaagttagaactcaaaaggagatgtgtagtggctgcttttgctgacttttgcctggcgtaggccaagcctcctggtccgtcttttcctttgtttctttattccagatcaagcttgcaaacctgcaccgtcccagatttcctggggtaagagaagtgattgtctaggagaggcagcttggaatgaataaaaacaggtccaggaaggatccctcagcatttaagaggctcaggaggggtccccctcatcatccttgttgtcttttgtgtttttcaagccgccttccaggtggatagcgattgcaatgagagagaaagagtatggaaggagaataagaagaatagggagacacagaagttaacaacgccctgaatgtctccttccaggacctgctgtgcagtgtccggtgaactcaccagcaagcatttcccagccctgttttaagcaatctccaatgcagatcaggtgctcgtgaataattgggagctcactgtgtctgtcagagttcttactttataatgaagagataaaaacatgttcatcacaggaaaatggacaaattggctaattgaaaacaaaattcaattcacaaactgttgtagaaattgaaaaaaaaaaggtagggggaaatgcttttcatagattccctgattttagtcttagaagaaaaatgtatttggcttgaatgaatagtaaaattaactaactttgattgaggagcttatgtgtgccatatacagttctgggctcttgcgacttggtgaatctcactataaccctgtgaagtaggaactatcactctacccatttcaccgatggaaaagcctatctcctgtgaggctgtggcttgccaaaggtgaaatggccaggaagtagaacagccagggagtgaaccccaaaagccaggtgggagcccatttcccctgcccactgcacgagacccctccccggtttgaagatccgataggggcactgctgttagctccccctgcgtcctggcagcagcacagtcagcagatggtcactgtggagaaggcggagctgaccacctccattttcctataagggagctagggccaggagaggtgcgttcacctggggaagtcctgcagcatcaaactaaagctccgggccaccctctcccagatgggcctctttccacttccccttgccagcagctatatctatgcctcccatccgttgcacggaagataaggccaatcccttttccacagaggctattttaaggatgccacgaagaaatacagagtaccaagtgcctccctgggccaaagataaaagtgggctgtgctctctggattcaaccttcatgtttttgatgctctctggaaggtcagggaaggcacacatatcgtatggatccaaagaggactacgcaatgcaaaaccacatactttttttttctttttaacttggagcaatgtcttgggacatctacctcaaattgagacacaaactaattgtgttgacagattctaaagtgttgtttcaacagtttcttcttcctcaaaggtgagcatcatgtgcacactgtcaaaattaaaaaaaaaaaaaaaaagacccaataaaacccgatgaaacccaaagagcatggagatgagaaactcactgctggctgacgatctgaatgaatggccttggggggaatgtgaatgtggaggtagcagaagggtcctgtcttcagtgctgattctgtatcaatacttggtaaatttaaaaaacaaaaaaaccagcaagggagattttaaatcatcaaggcagaaggatttaaaaagtggaatgtgttaaatgcaagagtgcgggatctttgcataaagttattatattttcaaaaattcgacaagcattgtttttaccaaacgtgtttaaagtaacagccctgaggttaatgttatgattggattctgatgtggcactttaaaaataaatcattttgcttggccttagcatttcttttcaaaatgtctctgtacttatctgtgtacaacagcagattaccgttcttcccagagtttaattccatgaacaccctgctgaaagacttgttaaggccttatggaaaactctgacctgcgtgttcattattgacgcccaagacgagtgcaaggaagttgatacttgggatgaggaaatttaaatcagcagctgatctggaatctggaagcactgccccttggatctcgccaaatatggaaagaattcttgtcactgagcaaatatagaattcagtgctagagttttacctcttgaattttctagaactttgttttgattagccacctagagtataagaattgctgcctatgggatttttcccagaagagtagataacataaagtaaccagcgataataattttcattatccaattatttcatgtgtctccataacacttaatacatcatgtttctctgcacagtaattcactatgtacagctagggtgaatagcaggaaaaaagagatcagatgataaagagaagggagacagatttgtgtgacttgtataagatacttcgcctctctaatcctttgtccttatctgtaagaaagcagcagtacccaggctgctgtgaggatcacatgagacattatgagagtttagcacaggacttggcacataacaagcagttattaggatgatgttagtttggattatgaattcaagatactacagctacattttttatactttcttaaacatcaatttaagtcaattttaattaacgttattttactaggagaaatgtctctaaaaacataagaattctatttgaagtctacaatgataattacattactctgatatcttaacttcctctttatgatttcaaataattaaaatttaagtttatgttttcaacaagtgcttattgaacctctactctttgccagtcactgttgaggacacagaagaaatggataagatatcactaaaaacagcttctgcgatatcagtgggtatacataaattattcacactcaacaacaaacacaagcaaagctgggagaatgtgctgacaggaaagaaaatgaagagtgggagagtggacagatgggaatcgatgtgaaattttataaaacatgtcttggccaagctcagtaggggaaatatgtggaaagtaagctagaccaaacagagaataaaagtataaataagaaaaaaaatccagaggtcacagtggaccactagccaaaatgggttcacagcaaacaaacaaaaaaatgtaatgaaatactaaaattaaagaagtacaaataaaaatgagattctgttcttatctgtcagaatggcaaagattcaaagagtaaaatattcagagttgttatgggtgtagtgtggaactggtctcatatgtggctagaaaaagggagaactggtataatccttccagagaataatctggtaattattttttaaattggcaaatatttaaatttggcaaagacttaaaaaatatatatacccattggctcaataattcctttctaggcaccaatactaataaaaagtattcaaaaaattaaatagatggtgtactgcaatataatgagtgaaacatcgcaagcagcatcactttatacactaggatattggttataaaatggtaatacatattttagatagaatataatgaaacaaaaattttgcttatcaaaaaatgttagtaacatgggaaaatgcttgtaaaacaatgctaactgagaagagcaggacaggtaggtagatacaaggccaaacagatacacacggtggagagacatatcccaattgttaggaatttgctgtggttggttaggatctgaacaatttatattgactttgtgatgacttttaaacgttttctctaccataagaattttttatgtttataatttatgctaaagaacaagatgtattttttgtaattcaggagtaaagaggagagtggggtattccagggtgctgttcctgccctaaccaggagcacgatgcagtcataggcctctgccctcctccagcagcctcggctcagaacaggacgaagccaaccctctctgaccagcaccacctcgggcgacccctggacgctccacctgcccctgtgtgtggtacctgccctgctacacctttaacaagcacccctgcaagctccctcctccttccttccctgtcctgtggctgcccagacccagatgtaccctgcctgggtgtgggaggccgcacatcagagcagtctatggctgtgggcttcacagctgaagctgggccgtgggaaatgttgagacgagtgagtgcagagcctgaaagacaatacggtagaaaaggttacatccgcgggggggcgtctgatggcatctgccatttattgaggatgggtgcgagacagggtagccattatgatcccattttacaggtgacgaaactgagatcagacaggctagctaccttgcccagggtcacaacaggaaggaagcaaatgcaagtgtgtctgcggccacgtaaggtgagagaagcgctatcaggggtggtctgacagaatccccaggccagggagcagttgtcctctatcctgtggggtcaaaggaggggacaagaaggctctccttgaggtagctccaaagaaaagaccccgccagagcacagtgtgctaccaaacgctggaacagcctggagactgtccctgtctcttctctgaggtttctcatttcagagaaactctcatccgtctggcttccccatggcccttactctgtgattctcttatgtatcagctgttaaaccaataaatccgccaaattgttgggatgcctataatggctttgggtctccactcccacagagggaatcttattctaaagttctaaatgtatcagtcatattttcctgaagacaacagaaatggttgtttcatttacttatttttatgtatgctttttcaagagttgttaacctgtgtttgtgtttaaataaagatctgttttgcaaaacaaaaactttatgagataatcacttataaacgtagataattaagaaatggttcaggctcagcacattgtctgagagcattgcagtcctgcactgtatttcatgggggaagaaaagcccacagatggagccattctcaatcctgctttccagggtcactgagtcagggtgcctggcatgcatgggtgcatgcacacacaggcagagggccagggagaactgtgctgtgtccacagagggcagcctggatcacagagctgaccaagaacggaagcagcaagttgttttaaagtagttgcctgtaaagccacttttcggcaaggacaaacactcagagcatgctctgaaatgacttatgcacagcagggcagcggcattttgcccctggccttccttccattctcccggaatccccctaaagtaacaaggactgacgcaattcgtatttcacttagccaacaggttgatgaaaaatcataaatctgtagctattaaactcattaatcacatccatcaaaattctgtgaggagttaactttcttcatataactcttagtcttaattaagtttccctcacatgtgatagcaaacgttcaagaagtgcaaatgtgcagacgtggcgtatataatgcaagctttatgtctttaaattaataaaattgagtcctatcaggtcgtgtttcaattaccatcaaaccttccaacctctgttaattcaaaaaaaagtaacttctttaggcaagtcatggaaatagcactagggtgccctcaggtctccaccaagccttgttagtaactttccatgtcctgtctgatttttaagatgctttcccctgatgctgctgccggctgctggctctctccacatccttcaatgtcagatctctgtgatgatggaaaatcccccacattccctttttacacattaagtatctttctaggatcagaacttgcaacctggggttcatgttctccttaaaaggtccggggagaggactgtatttctgttgtaattctatgtatttctttttaggcaccagaaagtattattctgagaaaggactgtaggcttcactagacttcccaaattgcagatggcattaaaaaaaaaggaatcaggaaagtctttgggaaattaggctaaaactcctaactgaagcacaatcgagttttcagtgcaacagcaggatccctgcagtctgtagcaaacactgagatgtttgtggggacagtggggccggtgaggttcagcacctctcaatattgtcagatgtcaccaatgcccaagggaagcaccaaaaccaatcagtgaattgtctgcaaaccatcagctttgttgcttccaagtctttactagaactcttaagctgatcttaaaattcacagacacttagagataaatgaacactctcacataagttcccaaaattcctttacttcttccaattgaaacattttgttcccaatttcaagttaccaagggaaaatgatggtaagaatcacaaagactggatacgaatatttagcttttcatagtgtctcatagggtcttacaaatgttaatgcaaaaaaataaaaactccactcaaatgcagaaaaccaacttaaaaaattcagagcatctgatacctaatcgactaattgatttatttactgaaacaacaaaaaaacagagtgcattgagactggaaattgcctctatggggggctgtttcctaattccagtggacagccatcattttccctatgctaacttgggctttgcgctaacgtaattgaaactgtagtcaacagactcaggacctcctttttccactctataaacaaggctgtaaaatcatctcattactttacccaggaaatctaacagaaacatgtcttaaaggaagtcacctataaagagggcctattttaacagaagattaaaaaaaaattcacctgtagtcattctaagggttcacttgggtacatacaataaacacataatgcaatgtaataaaatgttaaatcaagcatagtaccttagacaagtgtaaactattatttccaaaaaagtgttcagaaaatcacaaaatattcaaactttcaaaatagcttcatgtattcataaatgtatacttcaaattaaacagtataacacatttggatgttttgcaaaatgtacctaccttctaaaggatggtctgttatttcaatgtcctttttaatgcactgagttttttgggaaaaaaaaccacataagatcgtacccaagctattcaagatttacacagaatatttgatttaacatgcatatgaataaggatgaaaataagaacaaaaaaataacattttgggtcacaaaatcaagtaatttctattcatgtagctataagtagggcacattaactctcaattttataattcctgtctataggagccatatttcagcagattccaatccttgaagccaaagaaagaaaagtataaggtgaaagttcttggtacacagatttttaatatattattgaacacaccttgagaaataaaagctgaacttctcaaacacagtttctatggtacatatgagtcaaatcttctaatacaaacatttcaaattatgaaaataccaaaccaaagagtatttttgaaaatggcttggcccaattctgggcaaacttccattttcttatgcactttccaacaaactaaaagccttatgaaaacaccaccaaatgcttctcacctccgtgcagcaaaactaaagacatgcaacaaacacaattttcttttccctccactcagcatctgcttttgttgctgatttttcacatttctacaaatgtcacgaaggcatggtggcctttaaaacaactgaacggacccccattcaagactgcatgccccttgacttgtagtcaccattaaattggcttcatttccaggaatcaggccatatttaggattgtacctgtgcagatttacctccacattaatctctacatgctatctactaaaaacttaggcaaggaaatgcatcagaccaaacaccccacagcacagagaaccgaccggccattgctttccaatctccgcaaacctaaccattgctggaagaaatcttactcacagtgcacagacagtaggtattttattgaagataaacatatagtggaacaaaccaaattacccccatttgagttacgtgagcactcagttctcagcgtggatgtcccacaaatcaagtcaacatttgcgtcccattaccagcagccacttgccgagtatctcttcgcttccactgggactgcctggcatccctgatgctaaggagccactgaagagcctccaaatgtctgacattcacaaacgcatcttttgctttgacccgacccttcaacctctccgagtctgctgccttttctcagacacacatccaggcaccgttagggatagttagagaatctgaaaattcagaagcgctccgaaaagcctttccaaaagtaatccacagcactcaacagtgaatttagaaaccccaatttttttctgagtttgaagtttttaagccttgcggatggttggagtaggaaaaaggaaatttactaggcagtgcaaaggaaatcttgttgtcctctattgtggcagtgggggtgttgcccaaccctaacttatctgccttgataaaggaaaccaaagaaaagagtaacaagaacaagattttgtcaaattaaaaggaaccctttccttaccttaatagtgctggccataatgcgatcaagtttattgatcgttaataaatgttaataataattattgcttctctctgaccagaaagtagttttgatgaggttgtttagagcggatgagattgtgctaagtctgggaaatgaagtcagccaatggcaggaagaggtttctattggtcctggctgtccagcccaaagaaacaggatatttgggagtggagagataagagaccctgaaaacaatgttgtttttcttgatgatatgcagccaggagattttttttttttaattaaaaaaagaaaaggcatcaattgggatggggactgccacagcaggtgtgaccggtgtgccgccgtgtgacacactgcactgagaccaaggcaggatgcagatgtgatgggactccgcatggcttcacacgggctgcaagcaccttggagccaaggcgttgagggcaccccactgccctgggtgtcagcccttcgcagcccaattcttcgcagaattactaggacagaggacttgagctcctttctcctaaaaggaaactttgcaggtggagtttatttcatgttaatagatggccatgttcagtaacagccattgcctggctgatttttaacaacctatatttattcaacatttcatataagtgttccagaacagtttcattttctccttccaaatacctgcactttttatttgctctacaacaaagttgttgaaaacgcaaggactctaggcttacagtaaacacaaaaaataaagaggaaaaataaaccttcctaagtcttgttttcaagtatttattaaaacccaaataactgaagtgactacaaatgtcccggaatatcagtgagctggtctcactctgacagacatccatgttgcagacaacagatcctcatagaacttttggctacccagagatgccatgtgagggccccattacatgtctaaaatccaagctataagttcagggtcacaggtctgttttctcctcgaaggaagtacagcgaatgcaggcctgaacattccttagagggtttcaggactttaattactcattttcaggaaattgcttggaagaaacattttgctttgaatctagctacaggaacgcaggacccataaagaggtgtggtctcaataggcgaccccaagaacacaatagactaaatcctgagtcatctgacaattcctggttgcagagctggacgttcagtaaatggatttcactcagactttaggccggcatgtgtcagagttctgtccaccagcccaggtcattctggcttttattatatacctctgatttatcacctcatgttaggacaaaagaaggaggagaaggagaaagataaggggggaaagggagaggaaggagaggaggaggaggagggagggaagagggcgagaaaaaatggagaaggagaaaggaaggacagaagagagagagaaaggaaggaggatgggaggaaggagggaggaaggaaggagaaagggagggagggagggaaagaaagaaggaaaagaaaagaaagagagtatattgtaagaaaatcattctgtggaaatcagaacctaagttctcagcacctacattatgagggggtgttgatttccgctcttttcatctctgaacaatgaataagatggcaggctgattaaaattctgtttccccgaaaatttcaaagtcctgagctgttttatctgggcagcttccactagaattctggagtgcggaggagaaaagctctctcagcttccctgagtgtccttgctttttgttctctcctaagaagcatcaatgtaaaatgttaactgtggcctccacaacacatggcacctgattatgcctttaccaaacaccagctttaaataagatgaacgctttgctaatgaaatagccacggaagaaaatcctgtgtggtcccgcctcacccacgcctcgtggttgctaatccagccctcagttgttccctgcagcaggaaagatcagcatttctactgggacctaatgcttcagtgatgatttggccttaactccctggttcttgcctaatgcaaatcaaactgtgaagagtgggatttcttacctctctattttgaaataatttccaacttacagaaaagccacaagataatacaccaaactcctaataccctttgcctggttaactctgattgtctactggtgccaatgtacatcattttctctgctttctctcacacatgctctctctctctcaatctctgtctctctctcccatatttatttatgtataacatacatgcatgcatatatccatcattttctaactaataaaaatattgttttataagagacaaatttatttattggatactaaaaaagagaaaaacagatgctattatttgatcaatattcgatccataagttttactgcgtctaattttggaaatgcatacaaacataaaaagtgatctaataaaaagttaatttggggatactgagtggtaaattctgttccaaaattttacaaaggaaactcctcctcatttctaatgacaaaatgtttgattgattcctgttgtcttcaaagagaataattcttgatgtttcaaatggcatcatagcatccaagcctggtaatctctgactatttaatgtaaagtgttttaaaaaaatctttggctcttgataggacaaggcacatcttttttttttttttttttttttttgggacggaatcttgctgtcgcccaggctggagtgcagtggcgcgatctcggctcactgcaagctccgcctcccagcttcacgccattctcctgcctcagcctcccgagtagctgggactgcaggcgcccgccaccacacctggctaattttttttgtatttttagtagagacggggtttcaccatattagccaggatggtctcgatctcctgacttcatgatccacccgcctcagcctcccaaagtgctgggattaaagacgtgaaccaccacgcccggccaaggcacatctattaactagaatatagcagtgcagaaaccgtttcccaaatattatcctatggggaaattatctgaagatatagatatcactctagctttcctcacttgtaccccaagtctatgttattaaatggcctcatccctacaccacccagcagcctaagaaccaggctgcctttcccacctgatacctcctctccctagggaaatatgccctccaagccaccacgcggaccaagttagggggcaatctggcacacggcccctacctgaggcccgtcctgccatgagcctatcagggcagggtcctttttcactctccttgagatgcagtaatcaccacactagaccagcacagcccatacagtagctgtggacagcagaacctatgaataaagcacacatttcccttgcatgcttctctgccacaaacccatcccctgtgaatctgccaaaaccttccactagtctcctcacattttactccaaagaaagaaacaaaataatataacataaatataccataaattcactgtcacaataaaagaaacactagtatttatttatcctaaaatcatttcttcccattttctaaagatcgaacaagttctcattcttgttcccttactaacttctctgtatggaatatggggaggaaggttaggagctaagaacactctgaatgacagccacatggttctcaatgtaatacatgcgcagagcaaagagaggagatccgtctgaacctccacatctgtggggacacaacagaagattcactcatgactcattcacgtctttatccctgccctatacatccctacaatggaacgcccttcctcctcaaaaacattgcaggaaaatgatgtcgtagatgaacacttagcaatatggaaaactgctctgatattttacctggttagttaaaaaatcacagtatataggagaattatatccatagactcattttgttaaaaataaaaaggcagttggggatggccgtgcattctgttccaaagcatctgtgaacctgaggaatagacaccatgagcgaagctaaccttcccgagttgaaaaatgaaatgcaatggtggcagacatgtccaaggaatattatggggactcgatccctttatgaatcttgtcatagatgaatgtgtggagatgtcaactagttggcagcagaacagtattggaacggtggtaatacaaggaaatagtatcatcatattagaaactttggaatgagtataaataatggctgttcaacagaaaaacccatgtcccctctccaaagggcctgtttcactatatgtaaaaattaggtcatgtatgttttcatattagactttttgttaaataaccttttttttttttttttttgagtctcactctgtcgcccaggctggagtgcagtggcgtgatctcagctcactgcaagctccgcctcctgggctcatgccattctcctgcctcagcctcctgagtagctgggactacaggtgcccgccaccaccctggctaattttttgtatttttagtagagacaggttttcaccatgttggccaggatggtctcgatctcttgaccttgtgatccactcgcctcagcctcccaaagtgctgggattacaggcgtgagccaccacgcccggccaataaccttttgtaatagtcaaaaaataaaaaataaataaaaaggcaaagtaaaaatattgacagctatatcttataataccaatggcagagaagctttttgttttttcccctcttcttctttggttcacttatattttcaaaacataaatttgtaataaacataaattatatcctaatataaaaatatgtaagtaacatgcaatgttgttcatttttgtaaatatctgaaaaatacaggcatgttctgtaaaaagtgcagcccacaatacttgtaggtgtcaaaccttttagcatgcccaaatgcctgttcttttttaaatgtctacagcaagcatagagctctttttttttttcattttattaagaaaacccagaaacgctcaagagtttcgtggaggccatctatgcggcattaatccattcaggtgatattaatggccttttcctgccaggaactccagtgggcactcaggaagccaggattacagggctctatccagtcaccgcatgtctcggcattcgggaagcctatctcagtctcctcaaattctgcacacataaaacttcagagcctgggagcgacccatgaaacgcaggtttttaaggacaaaacaataggacaaaagtgctgtatattgtccttaagatgacacatgaatttaaaatgcatagtgtttggattattcatgagagccccgcaagaacgatgtcccaggggtttttgccaggaacatgcctgagattgtagataagaatcaagcatctggggctgccgcacaatggaaaactccagcactccatggaacttttccatctgcagcagtcggaggatttgcctgagaacatacgcggcatgaagacactctcagccctcaagggcacccagtcagcgctgtttaaggacggtttttctgttcacagcatacttcatgattacagcttcactccattggatacaactatgtgagtatgtgtgtatgagtgtgtgagtgtgtgtatgagggtgtgtgtgtgggggggtaggggagtgccatatcccccagcagcacattaagaaataatccaattacaatttaaataaccattgtttcaacactttctctaagtggtgaatgtattcttcagtctcttggttgatctgaactaatagaaaccaaggaaactgttatcacataccaaatcctcaacttctcaacaccaagttgcaatttccttaatactgaagcacacgtcagttcagttctataagctcccatggagcaatgatttcaataaacacaatttcataagcatcccacacgttctcaagtttaggccaattttgctcttactcaactccatatgactttaaaaatgcaggaatattaaaaccattatcaaggactccaaataggtcaatgtattatctgtggttttaagaaagaaacctaagaggagagtaattattttgtcaccattatttagcttaaaataacttttaaatgtattgttccaattattaggcttctccatataatttggaaaccattaaatgagtttcaacttctttgtccgtataactgggtatatctgagcatagatgctacagacatcacgttgccattggtgcccataaggcttcgtatgcccacagggcatataattaagattcacaaaagcatctgactggcatcccactctacccccgactcagatccaaagtatcctttcccaggtactgtcccctgtcaccatccttggccaaattgagaatttatcccaggttgttgaaattaattttgattttgattctagtcagagttttaaatgattttttaagaagtgtgtcaatctcacctataagatactaaacagcatcacttatttttgtcttaatctgtcactattttatgaattatttttaaagaaaatacagattacttcttaaagaaagatcataagtggcactataatagcattcaattgatagaaattgatgtagaagcctgcattaataatttttcctgctgctttctaaagttggcttttagttttcggttgaggtgggctttaattcagcatcacctcatttgatgatttatttactaatttatttccatcacaaatggaatcagaaatgaagcgaaggcaaaaaatctttgccacaaattcatttatatttgcatgagtatcaccaggctacctgcggatgcaatgaagccctatacccgtgcctgaagtcaggagcacaggacactgggagtctgtctcagcgcagtaactgctacatggtacgctccacatggtatcctctccacctgagccctcctcatccctcgccccctctccacacctcaccctctccacactgtattatctcccactgcaagcaacgcagaggacacagaggtgcagctgaagtgaaggcaggccagttcttttccaattcactcttatgaaaatgtgttaaatcccgttaaatgcaccgacctgaactgaaatgatgatatcagtaaatttgttgttgtcatctgatgcccacacagatctcagcacatgttttgggaaaggctgcagtgttcaaggagtactagaaatgttctttctgagtggactggccatgataagccaaagaatattatagccgatagggataaatcatggttttcccactgcgcggttgcctggtggagattattccagcctttatttacagctacaaaaataatcctgcctcaaggattttaggaagcaaccacctcctgcctaaagaactacactgcattgttgacttgccagctagaaaccagacatgagtcgtgcagggaagttccctttgaacggcttgaattgttgtcactagagggtgctaaatgcccctcaaaaaggcctttagagagaatactagtgtgcctaattcttgatttaaattccttgaattgacattattttacaaagtggtctcattttttacttgttaaaattaagatctaacatttataatgcagaaatggtgtttttttttgaaaaatttggattgttcattattatagaacataaagaaatacacgttttaggagcaaacatgaattacacagatctgaatataagattaaaggcataaatctgggggggtgagatttgtccatggaaattgtataattgttttatgccactgttaatgattttaaagcctgaaaaatttaccactttacaataattttagattgttcaatatgttcccaaatgtgagttgcatcaaattcggtaaatgtagagtatgtttgttttctctgtacacaatactgacgtcagtgctagtgcctgcctaaactcagacaccagtagatccttttccagaactaagtgttataggaggaatatggattatactgtaatatatcagatgtgaaaaaagcctcacggtcccttcctttctcaaaaaaaacgtgtagtattttggaatatgcatggagtatagcacttctaaaaatggtactttatgtatatatgaagtaaaataggccttaaaacttaatatacagatttccttgaaaataatcttattatacatttacactgactttttggtcatccaaacattatgcacttaagcaaaaagaaatataaccaattttgcaactttcctcttcctgcctttgcttctacttaaaaatatctgcagtatttccttttctcgccgcttccactttggttcatataccaaggaatcgtgaggtcaatgggtgacagttgtttgtctgtgttcacggctgtcgggcggggctgggtgtgggtaaggctctgaccgacatctgaagaggcttcacccactgcggtttaggatacattttcctctcgctctgccagtagaacagggaggctagttttcaatgtgttctacagaaggataattaaggcagtgtgtcacctgctcgtctgctatttttaaaaggaaacaaacataacctttgcatgtgagaggcattgcaaactagatgggaggaggcccggaccctgtaacagtcgtacattccggtcccagcttcgctggggtgcaactgcagataaaagacgctggctcgacaaaaagcgcccctgggctctgcattgccagcatgcacaatacgaattgctaatgatgagctggcttaggtaggaactgaggaccctgagtgcagggctaacctctgcttcacaggaggggtccactggcgcgcgctggaggcggggagccttcgtgatatttctccgaagggaagagtccatgcagcatcctgataacagggaccttggcttcatccccaactgctcggtgaccccgatgcgtcatttaattcatttgtgccaatattcctttttcaatcaaccagtaactttgcaggtttgttcaaagaagaaattaaaatgcattggagatggaaggcagccatcttcccggagccccagtgctgacactgggaggggaaccccaggattccctcatgactgtgtcagtgatggccctcaacaagcacttactgaatgagtgaatgaatgaatgaatgaatgaatgaagccggccacagagcccaggagtatcaggggagagcaatactggctgtgtcagtggctagtccaggagagcccttcaagagcccagagttcgacttgaacttgggactcccctgggatgggtgaggttctctcaacagcagttgacaggagggaactgggacaggcccagccagtttcattcagtccagccagctgtggctcctctttaggaatgtggccaggcccagctgtggccaaagcaccagccagtccctcagttctgaacagaacgtgcccagcatcagtgccttcatttgtttttaaactgcctgctgaccatccacaaagttaagatgacagctgggacttaagttgtgaggaaccagtggctcccccatcactctctctcacacacacgcacatgcacacacacagagacacacagacacacacacatgcacacacacagagacacacaaacacacatgcacacaaagacagacacatataaacacacatatacacacatgcacacacatatatacacacagacacacaggcaaacacagacacacaatggatggtatcgatatctatgaacagatgagagagagagacagagcaggaggtcatctgctccccacccctcttctccccactgtcaccacctctctcccaagtctagctgcaggccctgtgagctgtggaagtggcttttttaagctgtcttcttagattgagtcattgggcagtgaggaaggtaaattttctctaagaagcctcccaaatctgtatcttatgggatttccgtctcaataattgagctaatagtacctgtaagcaagtggatagtcaataaaaaaaaaataccggctgtaagaacgaatgaatgaatgagtggatgagtggatgagtatacatcctctattttgctggcatcatgattattttacagcagatttatctggatttcaatataaaataagagctcccatttgtatacaacttagtccttgtaattttccaaagtaactctgattaaaattatttccagccaaactatttaggcaactgggttggtttcacacgtacttatcagaaaccattagaatggtatattgattgcatttctagacatttgccataccaccatggcaactgtatttcccaagatggcccagtaggatgtcccatcatgcataaccttctataaagtgacattgactttgcttccatcagaaagtgaggtccacgttcccactccttgaatctgagttgggctgtgactacagcagaagttcagctatgtggcttccaaggctaccttggaaaggtgatagagcttccacctgattttcttgggaacagccactcttaaacctcagccaccatacggggagaaagcccaagccatgtgacgaggccatttgtaggtgttccagtcatcagtcccagcccacagccagcattaacccccagaggtataaatgaagaaaccaagatcactccagccccaaccggcacttgactgcaaacctataagagactccaagcaaataatatctatctcagcccaatcaagccctggaaccatgagagattctaaataataaagtgatcattgtgattttaagccactgagtcctgcagtgagttgttatatagcaaccgggcatcggcataccatcagaagattccttaagaagaaacttttgcaacgttgctacagcagaaaatattccttctgtatgatcattcatccattcatcaatcttgattggcattgcctatgtgctaagcattgtcggtcactggaggtgcagaaaagaagtgaagcagtattcagccaaacaaacaacttgcatattggatagagagaaaaatatgccaaaattacaacagtattttgacccaacagaaaggacataagaagggaacatcaacagttccttcctattcttttccaccctttttctttctaggctcattaaatgtagaggtgcctcagggtcactttgccccatgagagtagataccctcctctcccatccctaactttggtcttcactctatgcctgataccagcagctccccaggctcctccatgctgttggcaccccattcccattctctggaaacatctcagcccatcaacctcagattactttcccaaggagatgtgagaaaacttcaattttcccctttgtgacttgcagagaaataggggtggtaaatgagaagcagagggagagggtggggattcattaccttgagttactaaagagaaaagctctagtgtttagaaggtgctgttattattttctctgaaacattagctcctagaaatcagaggctctgtccctagcatggtctctaaggcttccaggacgccccaggggcttccctcagtcaattttgactctaatgagagccatctggaaggctgcaatggtgggcctggctgatcactggaggggccttcgctgtgggcacagggacgtgcacaggttcacagagtgtgtctccgtttctgggaaccatggtcctgtgtgctccttccccaaagaaagcaggagaaagaaaaaccacagtcctgagtgggattctccccaaacatctaaaaagcttctttaaagaagtcaagttatcataattaaactcacatatggaatgcctatagacaacgtgttgctcttccaatcccagggagctaggacacccaaaactcacctcccagacggagctaggatttgagatactggattccacattacttaaagctgttcgagcttttcatcaggaatggaaagcattaatgcgtctcacacgtcactctctgtttcatggaattcttacactggggagctctttttattttactatttttctttaacagccagaacactgagaagtttgcaaagaaatttttcagctgcctttagtgacccttaactcaagaggttttgcctaatctgtaaattggagttgaaaatatttcagtacttttggagtggggagctttttgtctttaaaagagtggaacgacactaacaatagggctatacataccttgtgcttctttgtcagttactgcaaaccaaaaccagatgtgaagtatcagcggctacctcgtagtgacccatggaagttgaggctaatccatatcattcttaataactcaaaactgccaccttttaaccacctaatttttttctcacttacaaatgcaaaaaaaggaattgacagtacacattgaaatcgattttcccctgaccacttacagattttctcctataagagccaggaataaaagctcactccattatatcaagcagccatcatctgagtatgctttagtttaggtgatcatcacctttaacaaaccaagatctggaaggaagatttctgatctttaacaaaccaagatttgaaaactagatattcctgtcatgaccttttcccaacattcagtatgtaagggattcactggattattagactgcttgtaaatgtaagaaaacatagaaggtttagtgtgaaggagttagcaacctaacaaatgtttccccctgaattttcaataaccttcctgaatttaaaggtaatgaatataaatgaagaacaaaatcaatagatataggaatgattcacaacctcccaaatgaataaatcaatcattccaccctacatttgaacattcaatcaatattttgtctatttactaaatctaagaggaactactttaacataaaactaaatatgaaattatttccagcattgaatattgtgttttgccttagagcaggcacaaagtggaatgcctatgggtacaaagctaggcattgattgatgtttaatacctacaaatacagcaattacactgtcatgctacacgagacttcctattcctacactgaaattagactgcacatatgtagggataaaagataagacacaatcatatcatatttcctcaaatctaagactttgggtggtaagatgtaaagcacatcatgatttaaagtatcactaggaaagaaaaaacaattctgccaatgaaaattcaccgtaatactttctaatcaatcaattttaagatacatcccaatttttaagcaagaataaatgtgttaaaattaacacaaattggtacacttgtgatacaacagaagcactaaaatgtcacagcaatagaccacagggtttctcaaccttggcagcatcaacattttgggttggttaattatctgttgtgggggctgccctgtgcatggcaggatgtttgctagcattcctggcctctacccactagatgccagtaacacctcgcagactccaattatgacaaccaaaactgtctttagacatggccaactgtccctaaaggtgcaaccaaaaactgtcccagttgagaaccactggaacagagcaattcggttttatcagccttgtaatataattgtgtgtgtgcactgtgtgcatgacagactgtcagcctaatggaaggtatattgtcagatgggatagattgacctgaaaaaatcacataaaccaacagctggtacatatacaagagtgtgtcctgcccatcctaacccacacaatgcaaaagaacctggatgaccacgagtcaccatcacaggagtttactatccataagtgtaaaccatccaagaaaagtgaaaacagattaaagaaaataaaaataaataaaccaccacacaatatttgggcctagccagataacaacaatgaaaaaatgtaatattttgaagtattggcaagaatgtggaggaaaaagcattgacattcgtgtataatgggaataaaataatttatcctttgtctccgcaattgatattctagaaatctattttttagaaatactcacaatagacagttataagtacaaaggatgtctgctattacactgctcagtaacagtaaaatatgaaaatacactgtacgtctttcaatcagatattgaataattatactacacagtattaagaatgagatagatattaatgtactgcatagaaaatattcaaagtataataagttttagaaaattatcacatatgtatattagcatatgcagagaaaacatcttaaaatacaaatttcagttttgaggtttggatcatggagtaactgcccccttttcaagtcaaacagttgagaaaatttaggataaaacaagtgtgtgctacctttgtaatcagataaagtattttaaaataattcacattataatatagaaatactgaaatgccaagaaaatttaaatatattaattaaaacctacgggccaggcgcagtggctcacgcctgtaatcccagcactttgggaggccgaggcaggcggatcatgaggtcaggagattgagaccaccctgggcaacatggtgaaaccctgtctctactaaaaatacaaaaattagctgggcatggtggcgtgtgcctgtaatcccagctactcaggaggctgaggcaggagaatcgcttgaaccagggagtcggagggtgccgtgagccaagatcatgccactgcactcgagcctgacaacagagtaagactccgtctcaaaaaaaaaaataataataataggctaccaattagactttatagaatacataaatatattaatatagctacaaagaggttgaagcttattcattgagacaagagtatttattgagcatcgactttattaaatacactgttagtaagataacaagtgaaacttgttaaaaaaaaagaaactaggacaaaagaaatttgagttgagttccccaaaaacagggaatattcagattgtaggggaaattgggtaaaggatttgtttcagcatgaaaggagcaaggagcaaagaaactaaatgggaggttatgctgagaagtatatcagtatgaggaaatatcttgacatctacagacaaatatttgttgccaattcattttgggcattgaggattcacaagaataattaaaaacacgtaatataaaatccttctgattagagcacattttatggcactgcataaagagatggctgtgggagtcatttatattttaatactaacttgaacaaggcttggttctgcaaataaaacagaagagtaaatatgaagtggagcacataataatgttactgtttctgtgggtgagcttccataggaaagaggcaaaggcatcaatctcaaaaagttagaaaaacccaaagaaagaagaagaaaaataacaaatgagaacaaaattgagaaaattgtaaataatatggtagagaagataaacaaaaccaaatctggttctctgaaaagattagttatgtgtaagtcactggtgattacagagagaaaagagggaaggttaaaataaccaaagtcaacaataaaaagggggctattactacagatgctgtagacattggaaggataatagaatattatgatcaatttcctatcaataaatgtgaaaaattagttgaaatacataattggaaaatataatttaccaaaactgtcaaaagaaaaaacacaaaacctgaactcctataattattaaagacattgattgaaaaatctcagacctcttaaaggacaactccaaaaataaaaaaataaaaaaaagaaagaaagttccaggccagacggatttatcagcaaattctaacatgcatttaaaaaaaaaaggatgccactcttacataagcttttcagataaaagaaaagaaagcttgataccaaaatgtagctagaaaattatttaaaaaggaaaattatgggtcaatttcatacataaacatagatgcaaaatcctaaataaaattctagaaaacaaaacccaacagtatatacgacaataatatatattgtgaacaaactggatttattttaagaatgaaagcttgtttcaatcaaataatcaaatttacattgtaaagaaaatttatataactttaaacaaaagaagaaaagcacttaataacattcaacattcatattaaaaattcttagtaaattagaaataaagaggaagtttataaatcctacaaattgataaaaggaatctaccgaaacctacagtaaaccacacattttcatgtcaaaactttaaaatttaatcatttgaagttgggggaaaagacaaagaagccccacatattaccgcatttgtctgaaattgaattggcagtcttagttagtaaagaaggcaaggaaatgaaatgcaatgttaaaggattgggaaaaagtaaataaaactttatttacagatgacatcatttttttacacagaatttccaagagaatttggaaataagtcattagaattaataaatgagttttaaaagtttgctagatacaaggtcaatatagaattttagttttatatatcagcataaacatcaatagaaatcaaaatttttaagtgatactgttttcattagcattaaaaataccttacaatatggacataaatctaacataatacgtgcagaacctctacaccaaaaactacaaaatattattaaaagaagaccaaaataaatggatagatatattcatggattgaaaaacttaataatcaaaggtagaattttcttcaaattgatcaatagattcaatgcagatgcattcaatatttcaacaaagtttttgtgaaacttgagtgattctaaaatatgtatggaaatgcagagtcaaaaacagacaagatgctcttaaagaagagtgagaaatacaaaagattatcagagactattacaaactggaaaacctagaggaaatggatacatttctgaacacatacaacctgccaagattgaatcagaaagaaactgaaaacttaaacagaccaataacaagtaataagattggataggaaaaaaaatctcccaacaaagaaaagtcaaggaccagatggtttcactactaattctaccaaacttagaaagaagaactaataccaatcctcaccaagccatttcaaaaaattaaagaggagagaattcttcctaattcattctatgaggccaacattaccctcataacaaaatcagacaagaacacaacaaaaaagaaaactacaggctgatattcctgatgaacatcacttcagttcagcatggatacaggccaatatttctggtgaatataagttttctagtattttgttcagcaaaagctatcaacaaaatattagtagcctgaaaccaacagcacatcaaaaagataatgcaccatggtcaagtgggatgtatcccagagatgcaaggatggttcaacatacacaaatcaataaatatgatacatcacatcaatagaaaaaaacaaaaaccatatgatcatatcaataaatgcagaaaaggcatctgataaaacttaacattgtttcatagtaaaagctctcaacaaactaggtacagaagaaacatacctcaatatattaaagtccatacatgattaacccacagctaacattatactgaacggggaaaggcggaaagtctctcctctaagaactggaacaagacaaggattctcatttttatcacttctattcaatataggactggaagtcttagccagagcaatcaggcaagagaaagcaataaaggtcatccaaactggaaaagaagtcaaattgtccctctttggagatgacatgatcttacatctagaaaaacctacagactccaccaaaaaactcttaggtttaattaaaaaattcagtaaagttgcaggatacaaaaaaatcagtagcatttatatacccaataatgcactggctgagaaagaaatcaagaagaaaatcccatttacaataggtataaggaaaaaatatctaggaaaaaaattaaccaaggaagcgaaaaatctctacaaaaaaactacaaaacactaatgaaagaaatggaaaaggacacaaacaaatgaaaagacactgcatggtcatggatcagaagaactaatatcattaaaatgaccacaccacccaaataaatctacagattcaatgcaatccctgttaaaatattaacgtcatttttcacaagaatagaaaaaaacaatcctaaaatttatatgaaagcaaaaaggagcctgaatagctaaaggaaccctgaacaaaaacaacaaaactgggagcatcacataacctgacttcaaaatatattacaaggctctagtaaccaaaagagcatgatactagtataaaaacagacgcatagaccaatggaacagaattgataacccagaaataaatccacatattcacagccaaccgactttcaacaaaggcatcagtaacatacattgggaaaaagacaccctcttcaataaatggtgctggaataattggatatccatatgcgaaagaataaaactggacctctatctcttgccatatataaaaatcaactcaaggtagatgaaagacttaaacttaagaccccaaattataaaactattaaaagaaaatagagaaaacatttcaggacattgatctaagcaaagatttgatggctaagacctcaaaagcacaggcaagagaaaacagacaaatgagactatattaaactaaaacacttctgcacagcaaaggaaagaaaacaaccagcagagtgaagagacaacctgttgaatgggataaaatatttgtaaactgttcatctagtaagagaaaatccagaatatacacaaaactcaaacaactcaacaattaaaaagaaaacttttacaaagtgggcaaagaacgtcaatagacatttctcaaaagaagacacaggaatggccatcaagcatatgaaaaaaaatactcaatatcactaatcatcagggaaatgcaaatcaaaaccacaatgagatatcatcataccttagttagaatggcaattattaaaaagacaaaaaataacagatgctggccagaatgcagagaaaagggaactcttctacactgtgagtgggaatgtaaattagtacagccactatagaaaacagtagagatttctcaaaaaactaaaaataagactcaatataatccagatatctcactactgggtatttatctaatgaaaaagaaatcagtatatcaaaaagatacttgcacccacatgtttaccgcagcactatttaccatagcaaagacatgaaatcaacctaaatgtccatccacagatgaaatggtaaacaaaatgtggtacatatacacaatggaatactatttggccataaaaataaggaaatcatgtcacttgcagcaacatggatggaaccggaggtcattatgtcaagtaaaataagccaagcacaaaggacaaataccacatgttctcactcctatgtgggagctaaaaatgttaatgtcatggagatagagagtggaatgatggttaccagaggctgagcagagagtgggagtggagaggaagagagtttggataatgggtacaaacatacagttagatagaaggaataagttctgatgttgtatagcagagtagctgactatacttaacaaaaatgtattgtatagttcaaatcagctagaaaagaggacttgcaatgttcctgacacatagaaatgagaaatacccaaggtgacagacaccccaaaaccctgacttgatcattacacattctatgcatgtaacaaactatcacatgtaccccataactatgtgtgtgtgtgtatctatctatctatctatctatctatctatctatctatctatctatctatctatttatagtatccatttttaaaaggcaaatcttaaaaaaaagagtgaggtaggacaacctgctctactaaacatttttataaaggcacagcaattaggtcagaatagtgttcatgcaggtagaaacaaatcagacaatggaaaagaaaggaaagttcagaaacagattcacacatatatggacacacttgatttttgacgaaggtggcagttgatttttttttacaaaggggcagagtagttaaaaaagggagaaactgttggtaaatgatgctggaaaatgagaaatccacatgagaaacagaaacttgagaagtaactcataacatcacaaaaattgatgtcagataaactataaatctaaatatgacaagcaaaaactatgaagtttctggaacataatatagaaaactatattcctgacttgggaagggaaagattttaaaaacaaggcacagaaacactaagagtaaaggaaagactaataaattgaactgcattaaaataagaaaaaaattaggaacttaaattttcatcaaaagacactattaagagaatcaaaaggcaatgcatggagtggaagatgatatctttaacacatctaatctactattcatatccagaatatgtaaagaacccccatcaatcaataagaatacacacaagtcagaatacacacaaggaaaaacagggaagaaactgcacaggcagtcataaaagaggatatccaactgctcattaaaaggtcttctacttcattagtaaagcaggaagtacaaattaaaacctgaatgaaataacaccacagatacatcagaatgtctaaaacaaagactaacaatgttggtgaagatgtggagcaataagaactctcacacacagctggagtttaaaaaacatccttatttatccatcagggctgtaataagaggcatatagcatattcaaataggtaagtgaacaaaatttaatgaaagaatttacaacggtaaaggtagaatttagtaaaaaccaaagggtgaggaagtcccccaggctagcaagaacaggaagccattactaccctcaggcctacaagggcaagggaggtagcagtcacgcagcaccggtagctgtgaacacaggagaggataaacaataggagctgtggccttccatggagggaaaaagtcactgccaacccatgaccaaagagagaaagctggagaaaaaaactccccaagctctctcctcctactctcaggcttccttgtggtgactctcatttgcttaacccaacagaagatagaggacaaaggagcccatttgatgtagtcgacagaagtcaaactcccaggacaagaggagcagagaaggatggagaatgaattagagaagtaaacaaagaaagtcggcacatctactgtcatcaaagactgtgtaattccactatttaatacatgtacaatagagatgtgtgtatatgtgcaccagaagtcacctacaagaatgtccactgcagtattattctctcagttaaatgctatatctggctgcacaactagattaggactgagaccctaaccacacatgtagaagcagggagaaagatgcagttgagaagccctttgccatctgatatgcttccaaacaagggaaactcagcttggacactgaaagcattttgtataaaatactgtttgtatgatatccccatgtcaccacacacacacacatacagacacacacacatacacacacacacaacaaaaacaaaaaaaacttccagggttacttttctcctcagttagcaggtcaaaacttttcacgtgtgaaatacttttgcaaggaggcagatgaaacgggggagaagggataaccttgccttgcagtcatctatcaattcactgcaaggaaggaacacagagcttagatatgaagcatcaggagttcttcccaagacccttcttgtcccttgggaagagccaggagctggaggggatggccttcactgagaagtggcatcaaattagaacctgcacaacaaataggaaccagctacttaaagatccagagaagtagccctctagactgaaggatcagctcctcaaatatcctttttgattttgaactcacaagttcaggggcatccgaggaacagacacaagccagggctgaacaatctcatctgtgtccatgaggtgggcaagagccagatcctactgaggagtttgaacttaatcccaaacatggcgggaagccattggggccaaagatgaattagggattgtctgatctccttgacacgttctgaaggttttgtgtacagaaaaggtttgtcaacatgcacaaaggaaagctgggataaccaagctaagacgctaccgcatcattctaggggacgggtgactcattccaggagtttctgcaggaagacctatcaggactggtgattgactggaggcagagagcacgaaaaaagaacaatcagagatgatctgtggtttgtggttgttgtgtaatgttaaggcttaacaactgcgaaaatagtgtttttactttacagagaagaagacttgaagaatacaagattggggagagcagatcgggatttgtactttatatcagacgtgctcatagatatacatgttgagatatcagttgggagctggatatatcaggattcgagactgggaatcaccagtttatagatggtttttaagccatgtgattggatctcatttcttagtggggagaagtgagataacaaataaaagccaagattaaagctgaaccttcagcctgcccatcacttagaagcccagcagggacagaagagccagccgacagcacagagtcgaggaggaggatttccgggcttcagtgagtgtgcatcagagattcatggacacaacttaaagtaagaccagccacacagttcccttcattttctcaagcaacattcagcatctcaaagtgcggctactacacacggagccaagccctggtccagttatcacaaaaccttactagatatgtcgattattagctgcattttatagctaaaggtaggcaggcacagagaagttacgtctcttgcccacagtcacagcaagcaaacagacctcagaccaaagtctttctaactccttatttcacatctaaaacactatgtgacgccacctccaaaaaatgtgggggttactctaggacaaaagaagctcatgaaagcaaagagagaagcatagagcttaaatttagaacaatattcagggtgattgggaaaaatagcctccatacaaatataatcggttcatcaccaggtgaataaaatgagagaggaacctggtacaagtgaagttcattgaatttgcttgcaaaaaaacataattcaagtgtggaagtttggaaactaaaatagtaatcagctaaagaaattttcaggccaacttagacacaatggtgacaaagctcccctgaggagacaggaactatactacttgcaactctaactgaatggacttaacttagcaattaagatcaccgtaagtttgatcagataagtattaaagggtgtcttgggtacatttgcagattcagacactcttagttgtgaaattcttcaccaaaaatttgcaacttatggcttgcacattaaaaacatgatatgaatgaaattcagatatctcttggtaaattttataattattcctcccatcagctaaagttctcagtatgaagggttataactgatgtcatatacaataactacaagctgtatcatacaaaaattgagaattttctattatagaaagagttgctttaatctaaacctaaagtagcatcaataatttttcgtaagtggtccccttcctatgagtaagcccccaggaaaaataaattgcttttaagaaatgctgtaagtaagctgtttcatatataagttttgacaagatctggctacttaaattacaagatataaaatgagatttgtactttttctcaaatgtaaaaaaaaagatttacttctgaaataatggtctttataaaatatgcatttttgttcctttttcttatcatatctataaatttactaataaaagattctatcttgatttactaacatttgaaaagattgattatattggtattgcaagaagaggataccataaattaaaaatccatatattaaccatattcttttatttgcaatatgacaaatgattgtgtaaagttataatcaataaaagctatttgaaagtcataaaatggatattgccataactgctttcctagcaaggttaaaacactttaactatttttaatcaacttacagtgtagtagatcaagcatatctaaatattttattttaatcaagcaaatatatttctgctgttcctatgacagtatgaaagtttggttcaaaatatttccaaggtatttaacacagttcagtagaggtcctgtctcataaatcaatttcagattagataaaaggaaaaagcaaattcttgtttacttcagaatttttcaagccagttccaaagacagagttgttactctcatgtgaattttcagtagaaagctgaacaacgacgttgctctgacaatctttttaaataccatatgatggagacagaataacaaaaacaaagtaggtataagctgtacgaaattatttctcttggacataaaatatgtttggggaagaaatgcattgttccatatggactagggtagttacttctcaaagtgggagcaactcagactctgaaaaatggtttctcaaaggaggcattgtgtctgggtgaggccagttttctagtcaaaatcattttattaaatgccattggattgaatgcttccaggtttgctctctgaaatatgccctatcattcttaaaaaacacacttaggtagcaaaaagggcacactaaaaataacgtgggttaatgtttctatcctgcctgtgttttctaagtagcccctgcctgagctttcgacttttttaaatgaaccatcaaatagttggttgtctatcacaaataagccatctattttgttattcctgtaactttttgtagaatccagaaagtaacattcttgctgatatatcttatataacaccaagtccattttccaaatgaggattccaatgagtattcatcaccaacatctccccgaaaaatatttagaaaaaacagactcaatcctttatccaaagtcagtgagtaagaggcgggggccagggttggacaaaaatctctttggccaggaagccggtggtcaccctgatctacttctctaagctcccacccctgatgaatgttcaatatctgagtttcaccccactcattattgtaattctccgtaaaaccccagttacccacacggaattctcatctacatctagcccaatttgctactggatttcaatgttatttcatatgaaaacaatcactaacagaaagaacctggatctggtttcgaaaacataatttgaaaggaattcattctgaaggctgcaaaagcccagtgatggcccatcggtaccctgaatgggcttctcaggtgcctccactctcctccgtatgtctccatccatctcagaatacatgtctggctcttcctgctcataaacagaaacagagagttccgggatccaaaggcaagactgcgatttaagagacactttgtttttgtaggtgttcaaggatttggaatcaaagcagcagaattattaaaattaatccaattttcttgcatttattttgttagttcatacctctaaaagatatattttggaaggcacccttcaacccacccatttacaaatcaaagctttctttggaatccctgagaccaaacccaagctagacagtgacacactgccagctccagagccctgcccacctggaaggggtatggaatgcactatttgacttgagctcacatttaattacagtgtcaaaaatcaaacttaaattgctttaatcagctgccaacactatgagcctttctggcttgaatttctataaacaaagaataaattcaaatctgtcacaaagtggcagcaacttgttgaccactggactaggaatcgttatgcaaccatggctcactgtggaaaaagtcaacatcttcctatatgtgactcttttctgatcttttcggactattagtcaacagaatcatcataaagctaaattatctatctgcactgaaattactcagcctcagacatccaaaccagtagctgttcaccaatgaaacctgaataaagctgttgctgactttccctgcttcaatttagagtatttttggaaacatcattgcatgtttaaaatataataagcaaaaggacctttggtaattaaacattctgtaatttaaaactccaagagacaggagcagtgataagatattagattttctttactggggtgaaaaagacagaaagtggttaactgtttaaaaaaagaaagaaagaaagaaatccaaggatttttagagccagaaacagtaacagtgtcctttattctggaaatgtttaaaagcctgtaagcagagatcacccagttcatcctgagcattggtgagcaaataacttctgaaatgctcttgaaagagaattctccagccttctctgtttgaaatacttcctaaagcaaacacaaaagtgggcaaaacacaagagctcatgttaattccaaacaaagagaccaacagtcgcaaattgagagtccatcttagaagcgggtgctgcttccacatcaagcaactattggaaagagtaggggtagatgcagaattaagatcatttgtgactacagaaagagacaagaaaattaatttttaaaactaaaagagaaatttatttcagataatccaaggaaatgagcagagtcaacctaacaggattctcaagcccctccctactggtgtggtgtgaagatcacacgtggtgtagctgacacccctcacatcttccccgcgcccctcctgccacctctttttggcattcaccctctctcgggttctgtatccctgcccatgttctccatgaaaggccatgttaatgcccatgctctttcctgcctctaacagacgatgccttccacagtcactcaagctttaaccctcttctggattcggacctgtacatccaaaagcctgccagacatctcttccagatgctctcagagcacatgaccagaagcacgcgcaaagctctcctgagcctcagtgctttccctccaacacttcttccactctctcagttaccgagccaagacacagagttgcttgtgagtcatttctctacctcatcccccacccaaccttcctgcgagatcctgctcacgttacctcctaaatgctgttacgtgacttcaaccacgtcagctttttatgggggaggagaggcacctgcatatctgtgggagcaccaacctctagacatctcctgccaagttactgcaatgtgcagaaaagaggaagaaagcaagcccaagtcgcaaagtctttgccagtccttctaccaaccacaccttcggtggagatgtgggtctgtggaaatgcagagacggactgaaagccaaatgggccaatgagagctctgaacaaaacattaagcttgtttttctttaaggcaatacgattaacagtggtccattaagaatccgtttaaaaaaaataataataatactttttctgactattgttggggaagaataactcctttatggggagtatgaactcaaagacatgatattgtaaaggaggccttgaagaagagagggactaagaaatgtgatggcgtggtctgttacatgtgcaggtgctgtgtgtgagggaagcactgaggaccactggaggatgagggatgctctgtccttctcgggtatggctgaaggacagggattgcccatcaaggagtaaataatccatgagtggactaaattctttagaaacaggaactcaaatccagtagggattaggataaaaatgtaaactctaatttgcacctctccctctctcccctaagtagtccgtttctataattttatactaaatcaattaaatgtatctgctataatattaatcataattttgtctgaagtagtaacaactggaaactacctaaaagagtcagagcaggactgtaagactatattgtagtctacactatgtcacagcggactgcatcatgatagagaacgatactcatgatttaactgataaacacatatggcaatgaataaaactgtgagtaagatgtctttaattttagcaaaattatcttcattctaattttcaagtaaacttaaagatttatatataaatgcacataatttaattaaaatacatgcatatattaactagaaggctaatcccccaaaatgtccatagatgttatttctgagtgaggagggtcaggaaggttttaattttctttgtactaactctatttactaaaatgtccacctggattaacgttataataaaaatgttaccgtttaaaataaaatgaataaaatacaccggtatgaaggtattattagaacatacgaaagtacaaaatcaagcagcaaaaggaggaaattatattaagaactgaaaaaactatgttgagaattctgtctaagaaacgctgtagcaattaagaaaaatcccagttctgcaagtaatgggagaaagatgatgacttccagaactttcaccatctactaagatgttcaccaattcctaagaagggactgaatacgtctgcatcctcagatctgagagtaattttccacgacgcatactgagcaccataatgagtgaagtctctgagatgacctctctgacctctctaaaacaatcaggcactgcaaacatggcctatcccacactagcccttggtgaaattcaagggcataatattagactgaaacagtgagaagaagattcgacatggagtgcggcaagaatgtgttctagtccttgaaggccagcgctattccaagtgtggtctcagaccagcagcctcagctgcagctgggggcttggaaatggaaacgtatgtgctacgtcctggacctgtggaatcagaatctctgaggtggaccaggaatctgtgtttttaaaaccctgtggttggtaacttcctgctggctgaggacagagagaatgcttagtgaacgctgaggaatgacgggttaaataatccctgaatgattcctgagcggatcaatttctcagccagagttttgaccgcagctgatgatgaacagggctgtgaccaccaggaagggtctgaagaggaggcgttgattgcagttttctgcctctgatcctcaggcatggagccccaccccccaactctcttacacggaggccaaagaaaaagctggaattctccaggagagcaggacctgttaaacagcaaagggcaacccaaaattgtatgagtggccttgccctgagaagctttgaagccagaggttactgaacaactaccctggttaaaaccctaacgtgacaatgataacatgtgactgtatgtggctgtcttcaaaacagcaatgatttaggcacaactgtggatctcagattgttccgtgagtttggtctgataagattgtatgcgtttcccaggggtgccataacaaagtgccacaccctgggcggcttccgccaccgaaatgtattttctcacagctctgaggtcgaaagtccaagatcaaggtgtcagcagggctggttccttttgaggctgtgagggaggatctgttctaggctctctctcccccagcttctgggggctgctgcagtctttggtgttccttggcttatagaagcatcatcccaatctctgcttttgcgttcacatggccttctcctcatatacctgtctgtctccaaatttcctcttctcataaggacaccaagcactggattaggggcccaccctactacatctgcaataaccctatttccaaataaggtcacattttgagggaccagctaaatacaaaacattagccaggcatggtggtgggcacctgtagttccagctactcaggagaatcacttgaacctggattagaacttcacaattactgacacgattcaacccatattaggttgtttagtattatacattaggaagccatagcaaacttttttttttttttttttttttttttttttttgagacggagtctcgctctgtcgcccaggctggagtgcagtggcgggatctcggctcactgcaagctccgcctcccgggttcacgccattctcctgcctcagcctcccaagtagctgggactacaggcacccgccactacgcccggctaatttttttgtatttttagtagagacggggtttcaccttgttagccaggatggtctcgatctcctgacctcatgatccacccgcctcggcctcccaaagtgctgggattacaggcgtgagccaccgcgcccggcccatagcaaacttttgtaaacataactatttattaaaatttggtataattaatatttaaatatcctttctggcaagatttagccagttttttaagcttcattgagagaaccacaatattagcattaataatagaatggtctattaattttttaaaaagatactatgtctgcatttccaatataaaattcacagcaatgattcaggtagaaattaaatgaggatgtcattgtcaaccttttaaattatattacaggagcagggagcacacgggccctgaggtagaaatgaataaggaatattctagaaccaccaagaagccagtgtggccacagcagagtgagccagtggtgctggaggcaggtgagatcttgaagggccttggcaacatgaacaggagcttggattttatccacattgccgagggaagtatgaggtggtgtttagcagggcataaatctcatctgatctgtactttgaggaaaacactctgacttctgtgtggagaacagtctataggaagccaagaggagaggcagggagatgagggaggggtgacttcagtctccaggagaatgagctagtgatgtgaattaaggtgctggtggtggaggaagtgaggtggagaactggacactgggatctattttgaagagggagcctacagaacttgttggtggatggctatgagggaaagaggattaaagaatgatgctaggcatttgggcttaaacaaacccctgagtaaatggttatcctattattaatactaagatgggtaatgctagggaaggagtagccttggggagcagtgatgagttattttcttagagagaagccacgttacctataggaggctcaacagagtatcaaattagaataaaatatctaatgttctgatttgtgtctttattttttccattaagatacacatggctggccaggcgcggtggctcatgcctgtaatcccagcactttgggaggctgaggcaggccgatcacctgaggtcaggagtttgagaccagcctggccaacgtggtgttaccccgtctgtattaaaaatacaaaatattagccaggcatggtggtgggcacctgtagttccagctactcaggaggctgaggtaggagaatcacttgaacccaggaggcagaagttgcagtgaaccgagatcacgccattgcactccagcctgggtgacaagagcgaaactccgtctcaaaaataaaaataaacaaaaaccatgggaaagaacaattgaggaaactggggacttgtcctggaacagaagacacgaggacttttggttttttagttttgtttttgtttttgagacagagtcttgctctgttgcctgagctggagtgcaatggtgcgaactcagctcactgcaacctccgcctcctgtattcaagtgattctcccacctttgcctcctgagtagctgagactataggcgcacaccaccatgcccagctaatttttgcatttttagtagagagagggtttcatcgtgttggccaggctgtcctcaaactcctgacctcaagtgatccacccgcctcggcctcccaaagtgccgggattgcagaagtgagccactgcgtccagcaagaatgaggtttgaagggaggcatgattgtgttctcttcaaatagttgaaaggttccatttgaaaaagggatttacttattcctatggttctagtaagttgcagagggtggatctaagaccattgggtgaactttacagagaggccagaaagccttctccaggggaagaaagtcaagaaaaggtctcaaaactgtctggcagaattctgcacaggagagtcctcaattcggtgtagaattggcaagtataataactgtaaatccctctcaatctaccatctacatcattaggcgacatcttcatttcctgaaaattccaacacatgaaggctcacttactatcaagatgagcaagtttgtgctacatagtgaatttgatttcaataggactcattttataccttttaagagtctttaaaacgttgaaaatgtaaagatctgcaagagcaactgatcttcaaagtcccgtcgagtcacaggattttgtaatgatgtctaaagaggaaaattcccatttcagaaaaggctcaatagtatttaatagttagctcaaaaggacgaataaagttctacatgggaagctgctgaactacagtcaggccaaaccttcatactcggagaagatgactgggcctgtagacacagatattgatgataaatcatcacaaaccacagctttccttaattggggtggtgggcagggagagcaggcttcaggttggccttcctccagcaagggcacacacacaaaggggacctgaacacgtggagcttatggtcaggaagcctgaagtgcctgacccagcacatctggtgactagtagtgtagattccccacagaaggaatgacaaggcgtcattattcaaagtgaccttccctccattggaataatcagaaacagctcacaaataaagtaatctgtaagatgcttcatcttctctaggtaacctctccccaacatgatgacatcacttcacatgaggcgacatggttttgtgaggacttttctttccttccaagtttggaatctggctgaaggctaaaatcaccatttacagtgtttgagccctccttcacactttgaagaagggtctgtgtaaatagccattcctacttctcagactcgccagaggcaaaacctgttttgctttggtagtacacgctcttccttaactggtaaaagactttaaaaaaaaataagatgccatttttaattgtttcataaatctggcttagatatattaaggaaattgctattttatatgtagaacagcggcaagcaaatctcaagagattaaaaatcatgttcttgtggttttcttttagaagctgcaaatttgaattcaatttaaaaaatcatggcacagggacaaaataagaatgaacaaagatgggaaaaatgtccgcagcattctgcagagtcaagcgctgctgtgagtgagtgtgcatgtttccaattacacatcagggcttggcgagctccaggagtcaaattcagacagaacccaagtgcagtgcgttacacagaacccaggccaggaaaagcttcacagagtctttctttcaactgaggcaattgtgtagacaatttggttcatttcaagaaaaaaataaaactgacagaagaaagaaaaatattattatattttgcctctcaaaacaaagtcaaattgtgttggtgtataaatcaagattcagtatttccttggctgcttccagaataatagtagatcacaaagagaataagaacaagaaagttcagttctcagccagacgatccaaggtaacaaagggtgagaccctcattccgttactcacaggagcaaacagacaaccaataataattgggcacatgggggtttcaacaagataaactgttatgtgagtccagggtgctaatttctggattcttttgagttgcaaggaaaatatataccgattccccacccccacccacccacataacaagacacaatagttaacagctggaagactgtggttagggggaaatgtgattgtaggcttccatttcaaatgatggaaaatcatttctgaagtcactacgaaagttacttcacaaaactaaaagaagccttgacaccttgtgttatcccatcatctaaagcaattctagtttggaaacacttgattcttggcaggggattctaaagaaggtgccgtatgtgaaaggctggtgtgtcagaaggagctttaaggaactggaatgagaacagccaaaagctaagatttctgattataatcacaggtctggatgtgttcaaggtaaaaagagatcatccccatcatttgcaatattttcaagagaatggggctttagtgacactgatcaaagtctgacatggattttcagctgccttccaactccacatacctgcaattcaatgatctctatggatagtagaagtaactgccaccctgatgttctcatcggtgatttatacgtgaagtggactcaaaagaaatacaacgaaatcccttaataaaaattatgtccattgacccaacaagcttcccagtgctgtatcagttctcaaccgattttagagacatttggtcaaaaatgatctacttgtaataagccatctgagggcactagctctttttcacctctgtgttccttgaagcaggaagtcagtaaaatcactattgaattaaaatgaagtaaagcactttgagatttcagatttctaaattaaggaacacacaacatacggtactttatttgcacaagaattattagaacccagggctaacacccaaatgaggtcacaggtaaatgaaaatctgtctcagttatttgaactcaggtcaacacacagacagagcaaagcaccagctgacctctgatgcacaacccagtgttcttaccatagaattccagaaggcatctcagtcattctcttatgtaaatacaaagacgacaactggtttaaaaattcatttatttttattttagcttctttgtgtcaaactcaaagaagcctcacataaatgatcaaagactttttggtggatcttccaaacgtacatgccgggaaggcctgcttgcactttttccttcaatcctctaaaatgaaggttttgaagatgcttgccaatggaacgttgtgccttacagctataatattttttaaaaggcattcagtttaaattaatatatttggccagacaactgtattaaaattcttgttgttttttctgttataatggtagcctgtggtatgactagtcttcttcaaaaatatgtacagttattgcttctctcttgcctggggtatatcatgtgtttttcatttgagtgtacattgcaatacctcattaaaaccaacacttaggctacacaaaagtcttcatatcatgccgcaaagggcgtaaactaacgtggaaagtttcagagcctcataactcattgcatatacctcttatactagctgctcaactgatatttagctctcctggatgatgtcacagtttttatcctcttaaaatagcctgccttcagaaaatatatagtttccttcatgcactaatcatggggagttacgatgtaaatagagccattttttttcttatacaaggaacaagtgctctcaccctcctcccttctctccctccccatacacagaagcacacttcacttcacttatactaaacacttcacttatacttacactgcaacaaagagttgcaaatacatgcaaataaagcctttataactcccctctctcctgctggacagctccttgactcaagtatttccgaagacagacactctgataagggtctgctctgagcttcattctcagcatacagtcctgggattatttacctaccaatattcacctctgcatgaaccagtaagtcattactgacaagaaaaaaacaatttgtgattttttttaatgtcacaatttttctttttaaggtttgggagagaaagttgttttgaatgtttcatcagtttctattgccaaatgaacacctgtttcagagtccctgaaagtcacacatcagaagcttctgacttcaacatatagtctgctttgaagaattattttaaaaaagcattgactgcttgaagataagcaagtgacactcaatagcttcattctttagtcttagaaaataatttttacacttcacacctattaggatggctactatgaaatataaaaaaaattaaaaataacaatggtggcaaaaatatgaagaaattagaacccttgtgcactgctggtgggaatatcaaatgatacagcctctatggaaaacagtatggtggctcctcaaaaaattaaaaatagaattaccatatgatccagcaattctacttctgggtatatattcaaaaaaatttaaagcaggatctcaaagagttctttgtacagccatgttcatggcagcattactcacaatagccaaaaggtcaaagcaacccaatcgtccatccacagatgaatgaataaacaaaatgtggcatacaataaaatgtcattcagtctttaaaaagaagaaaatttggacacattgtacaatatagatgaatctttttttaaattaaagtggtttttttaatcgttttattttaaagttccgagggacatgtgcaggatgtgcaggtgtgttacataggtaaacgtgtgccatggtggtttgctgcacctatcaacccatcacctaggtattaagcccagtatgtattagctattttccctaaggctctcccacccccaccatcccccaacatacaccatagatgaatcttaaggacattatgctgcgtgaaataaaccagtcacaaaaagacaaacagtgtatgattctacttatgtgaggtacctagagtagtccaagttcagaaagtagtaataatggttgccaaaaggtgggagcatgcagaacacggggagtgttgattgacatcaagtttctgttttgcaaggtaaagaagttccagagatttgctgcaccaacaatgtgaatatacttaacactactgaactgtaaagtggttgtgactacagattttatgttttatgtgtttgccacaaccaaaaataaagattaaattaaaaaataaaagattttatagcacctatcacttaccaaacccactgtacatcttacactcgtgaatattttatgattttcaaaacacctttatttttttcccttatttgttcattccttcatgtataacccacaatgtgttaggttatgtgctgggcagcctggaagacccaaagacgaattagggaagtaccctatatttaaagccttgcaaggacataaatatcagtaatataaagtaaaatatgttcactgctgaaaactgctatacttcctagatttttcaattcaattgcaatttctaatattttgccatgttgatcccacaaattcacttgtgtttaaaagttaacgtgcttgattatcatacagctgcttctttcataagaggaatacagataaaacgctatgggatttcagggggagaaagaacttcttattaaattcatattttcaaccaataagaaaacacaattttttttaatcaacactatcttcttggtgcttttttcacatctcatcctctttcctcctttaccctgcctaagcaaccatttctggacccaatcttgggttattacatctgacggcaagtgttatgtgggccatggaccatgagcaattagccccctctctactcctagggatggagtacatgtgatgatttccatcagactcagattaaatatcttgctggtaagttacccctaaaaatcgattaatggactctccaggtagacactgaggtaatctccaaccaaacctgacttatacttaggggctttggaagcccaccagagtcatcaagccatatctccacctaggctctatactggaaagctggtcagtagtaacacaaagaacaagccatttgggaaaacagcccacatgaaaagaactgtggtttcaagaagagtcattccatcccaggtttaaaatactcttctcctctttatctaccttgaggactcctatctatccttccataccagatccagcctcatcttctaagtgaagccctcctctgggacgtcagcgtctcctctgcatcccctagcattttatgcatcctctgttaaagcaactgtttgcacagctgtatccaccactaaacttagaggcaacagaccatggttttgaatgtgtagaacccaacacagagcccgagacctagtgggtattcagtgcatgttgaagggaagaatgaatgcatgagcaaacaagacaatggaagtctgtcatcagtatttacatttcaaaatgcaaagtgaaaattgtgcaaatctctaatcaagctgtactttaaaatgctaaattgatttggctaaaaatatttcaacactgaaatttctttttgcaagttaagtcttcgcataaccaaaacagaaaagaacgtatcaatgaactaaatagataaatttatggctgacaaaatctcaagatttagtgtgtgagaggaaagtaaaattcaatgtgtccttgaaagttctggggtctaagatatacaggccaatggaatagaatagagacttcagaaataaactattgcatatatggtctgataacttttgaaagtggttcaaagatcatttaatgagaaaaaaaggagtcttttcaacaactggtgttgggaaaactgggtatacatatgcaaaagaaaaaagttgggctcttaccttatactatatacaaaaattaactcaaaatagaacaaagaccaaaaaataaaagctaaaactctaaaattcttatgagaaaactctaaaatgcttagggaataacttcataacactggatttcacaagcctgtcttgaatatgacaccaaaagcacaggcaacataaataaaagagacaaatttgcctgcactaaaattaaacacttttgtgagtcaaacaagctatcaacaaagtcaaaagacatcctataaaataagagaaaatatctgaaaataatttatctaataagggattaatatccagaaaaaaaaatatatatatatatgtatataacctacaactcaacaacaacaacaaaaacaacccaatttaaaaatgggcaaaggacttgaacagaattttttccaaagataacactaatggccaataagtacatgaaattatgctcaacatcactaatcattgggaaaatgcaactcaaatccacaatgaaatacttcgtagccattagtatgactattaccaaaaaatcagaaaattacaagtgctggtggagatatggaaaagttgcaaatcttatgcactggtggtgggagagtaaaatgggaaagtcactataaaaaacagtctagtgattcaaaaattaaaaatagaattaacatatgattcaccaattccgcatgaagatagcaggaaattgaactgatatttgcacatccatgttcatagcagcattatttacaataaccaaaaggtggaggcaacccaagtgtccatccacagatgagtggataaacaaaatgtgatatacacatatcatgggatatcttcagccttagaaaaggagagaaattctgacatatgctataacacagatggacctttggaaagttaagagattgtcttatttatcttacgctaagagaaataagccatccacaaaaggacaaatgctgtacgattccacttgtgtgagttacctagggcagtcaaattcacagaaacagaaagtaaaatgatggtttccaggggctgagagaagggtagaatggaaagctattgtttaatgggttggagtgtcagtgtaagaaaatgaaaaaagttctggagatggatgatggtgagttttgcaccacaatgtgaatgtatttaataccactcaactgtacactaaaaaatggttaggatgataaattttatgtatattttactataacaaaaagtcataaaaatcaaacatggttcttctcattaaaaaaaaaagaagattcctgggtctagttggttctccctccttcttagttcttggatcaaggagatagaattgtgtccaaagtgaccaagtgacctacggagtaatgggcttccatctagccactccctgctttatgactgagctgcactgggagaggcattgtcaggggaaattccaggtttctagaattggtatctagccagaatttgtcccagggctaagtggctaaggcagtgaactagtctgtcagcttctctgttttaaatggagtcatgtaattccattacataccctttgctttcaactatatggccaaacatgactggccagcaggctgggggacagaagacatgtgggcttgtgcttgttacctggaattgaaaagagctcttggcatggttcttgttcaagctccatggttgactagcacatgaccaccaagagagctactgtacttctccgagactcattttctcttctgtaaaaaatgactgagtttctttcacagtgcataaatcttttcctccaggaacagagactgcccagggcctgtccaagacaactaggaaaccagagcagcagttaagccattcctgggcaggaataaatgagcagatgtcagctctcagaatctcagttttctcactcataaaatggaaaagaatactatttcttttatgtcattcaccatattgtgagctgaaggcactttaacgatgctgaggctgtaaactaatgcataatgtgatgtttatcattcttcacctatgttttagttactgagcatctcctgacaccagagaggacgcaacaaaaatcacaactcctagaactgcacagtctaaatggcaaccactagcccctgtgacaactgatcacttgaaaagtgagtagtccaaattaagatgtgctgtaggtgcaaaatatatgctggatttggaagatgttctatgaaaaaagtatctcattagtcatttttatattgattacatattaaaaagattccattttggctatgctggactcttcagatatatcctgggagattgtattaaaagaaaatacatgatggaaattagtgtaggtagttactagaaaatgtaaaattacatgattcacatcctatgttcactgttctagacatataaatataactttgagttatttttaagcatgagaagacagaaatcgacgaataaagtgaaaaagctaaagattaaagatacttacaaatcattgttgtattttttaagaggtcattttgagcatattccttaccattgaagcccctgcctgtctggctcctctgcccaccttgttttgctaatgggtcatgctcctatatgtgcatagacgaggagcggctctcagggactgaccgtaagcatagtcagcacagcacgtatacccatgctctgaccccaggttggcgtcttggagggtgaagcattttcccagtccttctttgactcatcacagaggtataaaacagcgtctccaacacgtgatttttttttttttttttttttgagacagagtcttgctctgtcgcccaggctggagtacagtggcacgatcttggctcactgcaacctccaactcccaggttcaatcaattctcctacctcagcctcccaagtagctgaaattacaggcacacaccaccacgcctggctaatttttgtattttagtagatacggggtttcacaatgttggccaggctggtctcaaactcccgacctcaagtgatccacccatcttggcctcccaaagtgctgggattacaggctgagccactgtgccagttaaaagaaaaaaaatattcaaacatatttggtttcttattgaggtgaagttcacataacatgaaactaacagttttaaagtgaacaattcagtagcatttaattaacaatgttgtccaaccaacacctctgtctagttccaaacatttttgtcaccccaaaaggaaaccacgtgctcagaaggcagtcactccacatcacccctcttcctagtcctatgctttgcacacaactgactcaccctgacagttataacctaaaagttaaataaaattattagtaaactgcaaacccctggcaagtgaattacttaatatctcttaaaatcctgacatcaaatgattcccctgtgaggccatgagatgataagaacatccacctccctctcttgctccagtggaatgaaaccccctcctcaaggagggttacactcaggcataggcccgatcactcatcatatattgacagatgtgcaggcctgagaccccgccttctggagctttctaatgctccttgtttctcaatccaatccttgctaggaattaggctcttctgctgaatgtaaaatttttccatctgcctccataaagtatgtgccacctgtcagctgactggtcaaccccaagctcaaagtatatggacattttgggggtgacaatggtgggcatacatctttagcaaagattaagaaggtaccagaggaggaccagcacaacccagcaatgcagcagaatccatcaggaaagctttggctctgggtggagctccttgctttagctctgcctttgagcgcttgggtggctggggaggcactggggtggaagggaaggaagcaggaattcgtgtgctgcaaatttcactacacttgaccacaacttggagtggaaagggcactgtggtacgtctatctggccttcctttacaagccttaaaatgctgtggaatccatctggatggaagacgccatccaattataaatccttaggatactttttattgccctttaagagttccgatgcttgctcttccatgcccatatgtttctgcttaagaggcttcattcaaatcaaattggaagagaagtccagattacccaactacaattacctgagcaaaaatcccctcaattatcttggtaatccagataaattcggagtacaaaggtgagttgcctggatagcactggctaagaactgctttgtctcccatttcaccttgcattattataatctacttgattacacttcatttataacaatagggagggcttgttttatgccacacattgccacttgctcaagtgtaaaataaaccttaaatgactgatgtactgctaaatttatctcaaaaaacaatcataacaggaatcttaaggcaataaagtcaaacaaatagaattttacagaatttaaaaattattttgtgagtgatttatgctaaaatacctcaaatttatttcaaaaacagtcttacttaaaactgacttaaaatatatgtaggataaataatttgtagtgaatttaacgaaacttcagcaattcaaatgaatgcacattattcttcttaaaaacagatatcctgaaaatatccatcaggataaatagctaatgcatgtgtggcctaatatctaggtgatgggttgataggtgcagggaaccaccatggcacatgtttacctgtgtaacaaacctgcacatccggcacatatatcctggaacgtaaaattaaattaaatttttaaaaagcagatatttggaaagtaccaatagcttcaaagtaaaaatactctacactgtttttgtttgtttgtttattttcgtttttgtttttcttttttgagatggagtctcgctctgttgcccaggctggagtgcagtggcgtgttctcagcttaccacaacctctgcctcctgggttcaagtgattctcctgacttggccgtgccaccatgcccagctaatttttttacatttttggtagagatgatggggtttcactgtgttggccaggctggtctcgaactcctgacctcgtgatccacccgcctcagcctcccaaagtgctgggattacaggcgtgagtcaccgcgcctggcctatgcactgttaattttatcacgacagttataaatccatcaagatgtcctgtgatttttcaacacaaattactcaaattatgaacttctctgtgtgtattttccactggcttgtttatgaatcctgctgatatgtctgctacaatttctccaaaggctaaaagatgtttacaggacaaatgacatcatgaccatgtcaggcttaaatgtgtttatatcagttgggtttagagggtcttcaaaacatggctttaaaatctcagttattatggagcttaatgtgttcctgatgtttctggagtaatgtatttctaaaaatagagaaatagattggttaaaagaaaatgaattgttggtctaatctgtcttatgcatggctaacgaaatgcattttcactctcttccgtgataatacgacacttaaaactgtgaggaccaatggggtgataagagacaaaataaacagtaaatagatactccatgtgagttactactctgtaatagatagaaaagatattttatagaaaagggaaaatacccacagacatataagcaatgtcctgtggttgctatcaaatttactgttagctgtttaaaactgccttaaaggttttttaaatgtgtcttttctaccatagattctttagacgacagccatcaagcagcaaatacctcgcaggaggccattgtgtttctatttgaacttctatggatgtcaagctctgttcttcaaaatttagccctacagatgggtggcccaccggagagaattaatctcactatgcagccaacactaccctttctggatctttccccagtagtgtggattctgctctagtccagaattatgcagaataagtatacttcatcttagacaccataattcttcaaatatctaaaatgtatattatgctctccaaatcctggtcatctccaggttaagtatctctcaaaaacagtccatcagataatatgattttaaatctttatccccttggtcatatacccacaatctcattctatttaccaatatccctactgatgcataaactacatatgtatatgtgtgtttttttttaaaaaaaaagcaattccactgtaattttagcagaggttatttccacatagagctatgtatatgtgtatatacacatatctttatattatatagttttctgtgctttcccagttatctacaatgggcatatatgacttttatagccaggtaattcaatattcattcattcagtgaacatcattgagcatccactatgggctgggaagtgaggatggagccacaaacaagcaaaataaaaacccctgctcttgtggagttcccttctcattggaagagacgtacagtaaagaaaaaaataaaagagtaaagttaatagcctgtgagaaggggatataaaagtgggaaggaagacagggtgatgtgtgagaaacactttttttttttttttttcagatgaagtctcactctgttgcccaggctggagggcagtggctcgatctcagctcactgcaacctccacctcctggtttcaagcagttctcctgcctcagcctcccaagtagctgggacttcaggcatgcaccaccatgcctagctaatttttatatttttagtagagacaggatttcaccatgttggccaggctggtcgtctcaaacttctgacctcaagtgatctgcctgccttgacctccgaaagtgctgggactacagcaatgagctgccaagcccggcctggggaacactattgaatagtgtggtcagggaaggctttactgtgaaggtgatgaagacccaaagaaagtgaggaactaagtcataaatgatgggtagaacattccggattgcgggagcagcaagtgcaaaggccctggggtgaggaataccaagaatgtttgtgtgggcagagcagaaagaaccaagggtaaagcattaggagatgaggctgaagaagtaaccgggatcaggtggttagggccctcaggccctggaggaaggctggcagcgctggagccacatggactgacaatgtctagcagtcatcccggctccctgtgaagaacagaccctcgcttgcagagaagcgaggacaattaggaaagcagagtcatgatccacgcacaggatcacggtgacttggaccagaaagagagcagtggagctggggagtgactcttttcagtatttctcaggtggtaccagtgggatctgcagagaatacatagttaaaggaaatgtctggaactaaacatgactcttcaaacgtgatcctactgtggcagaagagaggcgactttacatttcctttcccaggatatcttattctaatgaacacagaaaccgtaaaatcaagccaaccaacatgatgaaaatgattatataaggtacacagcccaggctggatttgaactgatgagggaaaaaaaatctctagtgaaaattcctctctctaaccacagccttctctccttccatctctgcctcacccttgctctttctgaagccttcctggatgctcatgaagctctctccttctttgactcatcctattttcccaggacctttatcaactcagggctcttctcccctccccacagtcagctcactgtgctctgactagttccctgaaattgctcatcctcttactaaccaggaagcttctacccgctcttggtcttctttctccaccccagtgccaaagaactaagcactgatggagaaaaagcatgcggctaatactgtctgtctctaccacaaatctcataatttttaaaatccatttggaatttacattcactccttaacttcttttcattcactcctaattcacttcctatataattctctacacagctgctgaaaaccttcctttctgctgcctcttaccccaaaactactctcacattactcacaaaggttgaccttgttttctatatacttttttagagtaacgaagccataaaatgtaagttctttcaacctggacctcccactcttgggatttctcaatagcttcacctgtattctcccccttcactcttgactcagaggtaaacgctcccttgctcccaaatcctttagcaacgtagggttgataattgctcctttccaaatttaatccctgcatctgcgcccctgagacagacactgccatgatttcccagcttgctgtcttctccctcctgcatctcctccctttctctgtgacggatattttccctgtgcaagagaaatttcttctgccctaaaataaataatccaaaacatctcttgactccacttaagctaacattcaatatctcactttcccttgtattaacaaaagttaattgagtcagtacggtgctacaattctcagacacaacgataaacatgatagagaccatcaacatgccttggcattttgcctgctttctcttcaattacttgcaacttggcttctactgagctccactgaaaaagctttcatgacatgaccacatccaatcccaaagaaactgtccccttgcccagtggtcttcaaaaccctccaactccacagtgtctcattaactccaactcatttcctactaaacatctcttctcagctcttcaaagtcaaagattgcgaaccaaatctacagacttctcctctcttctcctttgggtccaactccatccttctccatgaaacttcttattcctagaaatggtgtctgcaccttttaggcttccaggcttgagcctagagtcatctttaactctttccatacccagactcccaagacccagtcagctgtttaggtgtctcctctgtatgcagcacttactgtcattgccctggtccatctcccagagcccacatcttgtcccactgtctgcaaagcctttcctatatgctggatataagtgcaaactccccctaaaatcccattgaagtttttacttttttctatcttctttttttacttctttttatcttcctctactcacacagaagtgctccaattatgaggaccttattttattccctttactgtcaaacacaaagccaacatgccatacgaaaagatagtactgtgcttccttcagtgccactctagcacgcccactccagcacacccttcttgtgcgggtgtatgctcatgtgatactatcacaggcaacacttactatgcaatacgttttccacaatcacaatatttccacaatattgtgatatgagctcattcttcaggccttgacacaagcgcccacaaacctaagagaatgcattttcatttttatgatacacagttttcgactgctccactctggctgccaaggcattcctcctccaaatcacgatgtctatatcaaaagaagaacaatgagggagagctggaggtagcgctaagaaacaacctggtccagctcccaggtctcatagagaacactcagaacacgcttgttagaggtatctgctcctggcctcagcttctcagaagcaattacacatcttctgggtaaacgtggagtgtgcagcacagaataccaaagctgagcttcccattgtacctggttgttgatctcctcgttgacctccctcagctgaatatttcttaagaacagtgttcaattaatccaactatccctggtggctggcaggatgaatcagttatgacttatttcatgtttgtgggtgggtgtatgaagtggtcctcaaaggagatttttgctctctgcagacagtctgcctgtctgtaggtcacttcctgccatttcctttgagtgggaatatgagccagggtgttggaagaaggaagagtccaaaagatgtctcagggaatgtcccatagccattggcctggtctgccctagataacttctgagccaggtcaccctaaagtgctacatgaaaagtcatggattttttttctaacttgttgatctcaaatgtcgtgatttggcatgaatatctagcttcccatgttgcagctatggatttattcttgccaaaatattggggattgggctggagagggaagaaggtacgaagatgcattctgtgttgctcaacaagatctgcatggcctcaaccaatgcgtgtttgaccatatggatatttacaaaccccaccatcaactcaccaaaatgaagagtgtcttagacttattctcacaagacaagagggaacgctgcctctaaggagtctctctgggacacctgggagagatttatttaatggtaaagcaaggaaaggaaaagatgaacagtgacctgcaaatcattaaagagggcgactcgatcataggcaagggcttttattagtgctaaaattccacttcaaagtttgctgattcatggatgctttttgttttgctgtttatgttgtagaaactgatttgattttcatagacaaaataactaggcatttataaccacatataggtatgaaagaaagataaaatgatgcccttagcccagtcagaaatactcttaaccatcaaaatagttccctgaatctaataggccaacaatattccaacaccagaacctttgctaccatagccagaatttttaagactgcaccactgttaagtagaggcaatttttaatacttagggtctaaccacaaggcataaaatgcaaaaaaaattacataatcctgtactttttaataattaaatgaaaatacatagactctaagcaggaaaatatctgagatccttaaaacggtataatcataattgttctacattggtaatatgtgtgatgatatttttctccaaaaaaaattctctaccatttcattctctttaatttcttctagcccgtaaggtctagcaaagaggaatacctgaaaagatgcaaattgtacccctgtgctgttcaatgacagcaaaaattgcagctccccaaccccacctcttatgtcccctgagcaatctgtgatcacttgagggtgaggacagtatattgccccaataaactggctttccaccaagtaccaccaagaaatcaaaacagcttttattttattgtgtcatcatatataagttaatagttcataattagttcaaaatttaaaattatgttctaaaaataaagctttctaagtcaatgtaggcaacgattccaagatccttatagttttcctctcttaaacagagaccattatcatatgatttttttttttttttgagacggaagctcactctgttgcccaggctggagtgcagtggtgcgatctctgctcactgcaagctctgcctcctgggttcacgccattctcctgcctcagcctcccaagtagctgggactagaggcacccgccaccacgcccggctaatttttttttttttttttttttttgcatttttagtaaagaccacgtttgaccgtgttagccaggatggtctcgatctcctgacctcatgatctgccagccttaacctcccaaagtgctgagattacaggcgtgagccaccgtgcctggccagtcatatgatttctaaagagaaactgaacagttatttgtagaaactctgcaaagcatgactttgggacgggcacagtggctcacgcctgtaatcccagcactttgggaggctgaggcgggcagatcacgaggtcgggagatcgagaccatcctggctaacatggtgaaaccccgcctctactaaaaaaatacaaaaaaattagccaggcatggtggtgggcgcctgtagtcccagctacttgggaggctgaggcaggagaatggcgtgaacccaggaggcggagcttgcagtgagccaagatcgcaccaccgcactccagcctgggcaacagagcaagactctgtctcaaaaaacaaaacaaaacaacaaaacaaaacaaaacaaaaaagccatgcccaagcccacccctgaccagtgaaatctccgggattggggcacaggtataatgtttttataaacatcttcctagatgtttcctgcatccagggtgataaatcatcatactaaaggcatcatctgaaggctcctagagtatagagaagttcagaataaggaccccaaactattgcacatcctgacactaactagctgtagctgtgcaccctggacagggagagatctaaacagctagttatcttacttcaccgaaatctacaactaaagatgtctatccacgtgttatagctttggcttccctaatctagatgttcaatctacttttctgcaatttggcaaagtaaaacacacatatacagtaatgcacaatgtcctgattgttggggtttattatttgttttgcatttacgcttcttaggtatgtaacatgccaaagtcatgggagctgagtcttttgaaacagaggcttctttgggtgcaaatattaattttctatgaaaaaaagagaaagtacaaagaaaagaaaaaacagcagtaatacagaaatgaatatcttccttgtctaggacacagtgttttttttaacctagatttctttgaacacagactgacacaaaaattaaatactattgctccattggagaggtgcaaacctggggcggtgagagtgaggggaagcgagtgagattgtcactacactagcttctggggacatggagacagccagtcactgagcccctgccttcccttggccatgcagatgcctctgataggttacacggaaaaattctacctcacagcagcccatggggtggaggaaaaataggaacttagttgcctacattcttcctgcatccccttcctcattggtcagagtcaccctgcatgtctgggttgtcacctgctcccaaggtgaccactccaaaagtcaggttctacgcccggtggtggggtgcttcatccaagtacagaaatgccaagaggatccggaaaccttttgacctggttgctgagtcacaggaaagaagggccagccctcctgggacaggtaacaggctggccctgagctgtggaagccctcacacccagaaggagtcaatctgctggggtggccactgagaccaagcaggagctgagggtcctggagtaatagatggaggcccatgagatgtgttcagacacatagtgtgtttgtcaactgcaatgtgtgtgtgcccccaaaattcatgggtttaaatccttacccccaaggtagcagtatgaggaggaggggcctttggaaggtgactaggtcataaggatggaggtctcatgaattgcattagtacctttacaaaagggaccccagggagattccctcacccttttgtcacagtgtgaagacccagcaagaagatggacatctatgaatcaggaagagagccctcaccagaacccaaccctgctacactctgatctcagacttccagcctttagaactgtgagaaataagtttctgttgtttatatgccactcaatgtatagcactttgttacagcagcccaagctaagacagcctattatgtatgagcaggtggctttgagataattgagaaaacagagactataactacaaccagccagagatgggatcattgcaaatgggactcgggttcacacaaggtttgtgacacacacacaaaaaaacataaggcagataaatcagcaagggtagcagtcaggaattgacagacgattaatggattgaggaaacagaatagataatttaaaagcaaacctttgtacacaaaagaattcaggaggtgataaaagtaacattttcatatcagttggaaagtaagttattcaatagcaacagaacaatcatttattgaggaaaaataactatttctttcctggttcaatcttggggtgttgtatgtttccataaatttatccctttttttctgggttttctaatttttgtgcacagaaatgttttttaatagtctctgaggttttttttttatttctgtgggttcagtggtaatgtcccctttgtcatttctgattatgcttatttggatcttctctcttttttctttatcagtctagctagttgtctatcaatcttatttattctttcaaaaaaccaacttttatttttgttggtcttttgcatggtttttttgtatctcaatttcattcagttcagccccgattttggttatttcttttcttctgctagcagtaagtttggtttgctcttgttttttctagttcctccaggtgtgacattaggctgttaatttaagatctttccaactttttgatatcagtgtttagtgctataaactttcctgttaacattgctttaactgtatcccagagattctggtatggtgtatctttgttttcatttgtttcaaataatttattgatttctgtcttagtttcattgtttacccaaaagtcattcaggagcaggttgttcaatttccatgattttgagagatattcttagcattgattttatttttaccgtgctgtggtctgaaagtacggctagtatgatttcagggttttttttcatttgttgcaaattgttttatagccaagtgcgtagtcaattttgaagtatgtgccacgtgtaggtgaaaagaatgcatattgtgtcgttgttgggtgcagtgttctggagatgtctgttaggtccatttggtcaagtgtcaagtttaggtctcaaatatgttaagttagttttctgccttgatgatctatctaatactgtcagtgagatgttgaaatctcccactattattgtatggttatctaagtctctcactaggtccctaaaacttgatttatgaatctgagtgctccagcattgggtgcatacatatctagaacagttaagtcttcttgttgaattggaccctttatcattatataatgcccttctttgtcttttttgatcattgttggtttaaagtctgaaattgaaacgctgaacagaccaataacgaattacaaaattaaatcagtaatataaagactaccaaccagaaaaagccctagaccagagagattcacaaccaaattctaccagatgtataacaaagagctactaccaatcctactgaaactattacaaaagatttaggaggaaagactcctccttaacctcattttatgaggccagtatcattttgatacagaaacctggcagagacacaataagaaaagaaacttcaggccaatattcatgatgaacagggatttggaaatcctcaacaaaataccagtaaaccaaatccagtaccacatcaaaaagctaatccaccatgattaactacacattattcctgggatgcaaggttggctcaacatatgcagatcaataaatgtgattcatcccataaacagaactaaacacaaaaaccacatgatcatctcaatagctgcagaaaagacttccaataaaattcaacatcctttcatgtttaaaacactgacaaactaggcattgaaagaacatacctcaaaatactaacagccatctatgacaaacccacagcaacactgtactgaacaggaaaagctggaagcattccccatgagaattgaaacaagctaaggatgcccactctcaccactcttagtcaatatagtactggaagtcctagccagagcaatcaagcaagagaaaaaaaaaaaaaagaaacaaaatacatccaaatgggaagagaggaagtcaaactatctctcttcacagaggacgtgatttatgtctggaaaacctcattgtatctgtctaaaaactcctggatctgaaaaacaatttcacaacgttttaggatacaaaatcaatgtacaaaaatcagtagcatttctaaacatcaacaatgtccaagctgagagccatatcaagaatgcaattccattcaaaatagcaacaaaaaaaatacaatacttaagggtacagataactggggagtgaaaatctctatgacaagtattacaaaacaaagatcaaagaaatcagagatgacacaaagaaatggaaaaacattccatgcccatggataggaagaatcaatattgttaaaatggccatacttcccaaagcaacttatagattcaatgctatttctatcatattactaattacattttcacagaattagaaaaaactatttggaaattcatatggaaccacagaagagcctaaatagccaaagcaattctaggaaaccaaaaagctgaagtatcacactacctagcttcaaactatgccataaggccacagtaaccaagacagcatagaactagtacaaaaacagacacataaaccaatggactagattagagaacccagaagtaatgtcacacatctatagtcatctaatcttcaacaaagtagacaaaacaagcaatgtggaaaggattccctattcaataaatagtgcttggataactagctagccatatgcagaagattgaaactagactctttcattttaccatatacaaaaatcaactcaagatggattaaagacttaaatgtaaatcatacaactataaaaacctagaagaaaacctagaacataccattctggacataggccctggcaaagatttcatgacagactccaaaagcaatggcaacaaaaacagaaattgacaaatgggacctaattaaactaaagagcttctgcacagcaaaagaaactatcaatagagtatacagacaatgtacagaataggagaaaatatttgcaaattatgcatccaacaaaggtctaatatgcagaatctataaaaaaaaacttaagcaaattaacaagcaaaaaacaacttctttaaaaaaaatgggccaaaaaaacatgaaaagacacttctcaaaagaagacatgtgtgaccaacaagcatatgaaaaaacgctcaacatcactaatcactagagaaaagcaaaccaaaaccaccatgagatatcatgacacaccagtcagaacggcaattttaaaagtcaaaaaataacacatgttggtgaggctgcagagaaaaaggaacagttatatgctgcgtgtgtgaatgtaaattagttcagacactgtggaaagcagtttggagatttcccaaagaacttaaaatagaactaccattcaacccaataatcccatcactgggtatataaaggaatataaattgttctactgtaaagacacctgcattattcacagcattattcacaatagcaaagacatagaaccaatctagaagtccatcagtggtggactggataaagaaaaaaatgtggtacacaaacattacagaatactacacagccataaaatagaatgaaatcatgtcctttgcagtaacatgaatggagctggaggccattatcctaagggagttaacacaggagcggaaaaccaaataccacatgttttcacttataagtgggagctaaacactgagcacacatggacacaaagaatggaatgatagacaccaggggctgcttgagggtggagggtagacgaagggtgaagattgaaaaactaccaattgggcactatgcttattacatggtttatgaaataatctgcacaccaaactctcatggcatgcaatttacccacgtaacaaacgtacacgtgtacccccgaacctaaaataaaagttagaaaggaaaaaaaaaaaactaaatccctatctcacattatacatctaaaaaatccaaatagattagatttaattaaaaattaaaccataaaacacagaaagaaaatacagatgaatagttatataatttaggatgagaacagcctctgtcaggatgaactaaagaattcacaaaaaaaaatgttaacaaattaaatgacatgttaaaaatctggccaggggtagtggttcacacctgtaatcccagcactttgggatgctgaggcgggcggattacctgaggtcaggagtttgagaccagcctggccaacatagtgaaacctcgtctctactgaaagtacaaaaattatccaggcatggtggcacacgcctgtaatcccagctactcaggaggctgaggcaggagaattgcttgagcccgggagacggaggctgcagtgagctgagatcatgccactgcactccagcctggctgacagagggagactctgtctcaaaaaaaaaaaattaagaaactatatattgaaagactataaaaaatagttttggtttttttctcagtaaaaaaataatatatccattgtcaaaaattttctattttcaatattattatttaatagaaaaatttcaacaatttctggagaaaatatatgaaacacatttgacagagttttaacatccttaacataaaggatgtaacttatatgttacatccttaacataattttctttgttcagttaacaagtttttattgagtatctatattgaaatatgcactatgtctgacactggcaacacatttgaggaaataaagaagaaaaattcaagtccacatggaaaaatggactaaggacatgaaaaagtataaatcatcagtacacttctaataaagttaataatcaaagaaatgcaaataaatgtgacctatcaaggtcttgctatttgtactgtcaaattataaaaatacaataacaaatattggcagatattggggaaacaagtaatgtcatatactggtatgtgcttaaactggtaaaagtcttcagaaaggaaattggaaatatatgtaaaaattttggacagttgcatattctttgttctagaaattctacttatatgattagaacctaaggaagttatcatagatttaatcaaagatagttacaggatattcaacatagccctgtatataacagccaagaatctgaagccaacaaaaaatatttagcttaaaatgtatagaatatacataggatgaaattgcataggtcactaaacagtttctagggacatggaaaaaaaaatgccatattgcagaaatgcaatattttgggatgataaaagggcagtttcaaaaaattgaaaaaatagcagttactatgacctcttttggcaaaaataattatatgtaatattgttcatggaaaaatagactggaaatataacgattaaaatgttaattgtatctgggttggtgagattacatataattattatatataatctttacttttttagattgttgttcacagtgacatcaagatttgtcatgggagaaaaaatgaagaagattattattttgtagtcacccaaggagagaagaagtcacatctctggagataggaggagatagggcatatgagccaatcacatttctgcagccttttgtggatacaaaaggggtgggccaagcctttccaatatcccttttcctccttggtacccagacagactatatttaccagcctcctttgcagccaggtgtggtcatgtgactcattcctggtcaatgaaaggtagatggaagcctggcctaggaaacaggtctacatgcaatcttccattcttctcccacccactggctgaaaagaaaggcttctgaggacacagagtggggggaaggctaggtagaggctggatgggaagaaagcagggttctcttgctcctctcatcagagagctactgaggagacccaccgcacccagacccccatactggactgttacaggagtgagaaataaactttgtttagaccactgaaatttgagagttagagctattagcctaccctgattaacgctggggtagcccctcacatctgcccagcaccctcagcagagcctaacccaatcatccaaggttacccaatagagaactcaggcttccactagagtagccgtcacatagagttactgggtcttccaggttctgccacctccaccgtgttttgtgggactctccactgaactcacaaagcacatgtattcagctactccaaagctatgtgtactcaggaagagaaagttctaaatgtttctgtgaccttgtgccactgatatcatgggttctatccttcagagtgctaagaaaagtgttaaatctccagaatagctttggaaaagtggagaaatttgagactttctctatttttagttgctaatatgcattcctgaaaagtttatttaaagccacaaggaaatatttccatattgaatttcaatattgcaatatactattttagaataaaatggaaagatccaggacatagagcagctgagaagctacacagttggcccctgggcttcactcagacagtgcttctctaggctgcaagtcataagtctttgtgtcacccacttttagaagacatcccccggacttctgggaccaacctgaggtttgtaggaatctctgaggatcaatgatcaaacatatattagcttgaaaaaaaactaatatatgtgtatgtttttttaaaaggttaagtttttaacaatttagacgtcttggcattatactctgagaacgttaaccaatgagaataagagtgacaatttagatgtaaaacctcttaaaggtaaagataaaatcctaaccacatggggaaaaccatgtgttctgtggatgatttccctggatttctcaaaagactcttagaatgttctgggtatgactttgggggcatctgttctatgaagatgggcaccccagcatcacctgcatattaacccttcttcttgctcctaaagatgcagaattagctgagattaggaagatgtacaaagtgttctccctgcacttcaactaatgaacaaaactttttaaaaattacttatgatttggaactattttatcattttatatatcctatggcaactggcattttatatttaattttatcatcttttgctttttttctttgatctaaatcaggatgctaagttttgggggggggtcctacagttttggcagagacctcattctaaaaaagaggtaccagactattaaggcagaatctgctgagggtggccccaaacctggtctggtgaacctcactcaactcatcattgatttcaagggcacagaagaggcaaggagatgacagcaggagaaatggacatgtaccatggagaaaggggaccaaccacaccttctgtccaaactgagatttcccagcctgaaacaggtcaacactggggttagcaagaaactttaaactgaataggagattaaagtaataagaagatgagtactattattggtacaaattatattggtaatagttttaagtttcattctttaagacagggtgaatcacagtcccttctctcaaggtccttgtcagcattctacttttccaaggacattcaaaaatttctcatccaaagtcaaacattagtgtgtgtgcctcaaacaagaaatagttttccatcagtctccaaatctttgaatagtaaatggcaaaagtatggaaatgcaagatggagtggggcttaatgttgccacaacattcctacaatactgggatagtcttccttgggaattactttctttcctatcacgtatcaataaggaaagccaaatgtagaaataaagaaatctccccgatttacttaacacacggaggtgacagttacagcgcaaattgagggaagagtaaatgatttccacaaatgaaccaaaaacacttaaaagccacatttaagagaaatggagtcataaaggcaatatttgtgagcagataaaaaatcagcacagaaaaaggtgagaaatacacaatgtctttcatcaaggtgcaaggaaatgtaaaataacattaaaagtaccaactacataatttgaatataaagagaacaatagcaagaaaggagaggggaagtgatggcgatatggagacacagtctcttttgcatgcacagggcagaaccggtgcctcaggctggagggtgtctgtgagtaccccacaatgaaagcaaaagagcacccagcattgaagccacagaccttgctccatgaatcctagctgatgggctggcacagagagatcaggagcagaacaaggaaatccataggaggatcctcccaaagtacttttttttctggtccaaaaatccttaaatctgtcagaagcaggaggttggagtgggagaattgcagagcctggaacacacctgcctgctgatgacccattctgagggggttctttccacttggcagcaatggacttggtaaaaaaaataatagatccttctccatggatcccatttccctttttttttttttttttttttttgagatggagccccaggcagaattaaagaccaactctgggacccaaatttttagaggacaaaggttgatataatggccagcacgatttagtcatttagatttcaggtctaactaactgatgacagactttaacaaaatcactgaaagaaatttaacgtcaaccttaaataacagtagaggcaggtaatataacaaatagagtcaaaatggtttatctaaaggtctaagcccaagaaacatccaacaataaaattaatctaaaacaaattttttaataatcatttttttttcttgagacagagtttcgctcttgttgcccaggctggagtgccatggcacggtcttggctcactgcaccccctgcctcccgggttcaagtgatttcctgcctcagtctcccaagtagctgggattacaggcatgcgccaccacgcccagctaatttttttgtatttttagtagagatggggtttcaccatgttggtcaggctggcctcgaactcctgacctcaggtgatccacccaccttggtctcccaaagtgctgggattataggcgtgagacaccacacccggcctcatcttttctttaacattacaatttcccatcatggtggcacttgacagtagtgggactgtccaacagcaaatgaccccatctaagcactcaggacagaagccattttaggtcatgaaaattatacagattttgtgagtgaagggcatttagttctgagcagaaagtagtcttgcaaaagggaaatttgcaacaacaacaaaaaaggacaaggagggtgacaatgtcaagcaaatgataaccctgctggagcttcagaaggaaccagctacatccctttcctgcttctacagatgctatggcagccccagaggtgtcccactaggatctcccttcaagaaagaatctagcatgcatctgaacaacctccagctgttcacacctcaggccctgcctcatcccagacagccctgagccaatcactgacacagcagggtactagagcctggtcatttctgcccaacccggggcccctccaaaggcaagctctgctccagacctccccgttgggttggtcaaactatcaaatctgtacctggtctgaggctctccctgcccagtcttgcttcatcctcattttatccttcacaggcacagcccccttccccctccaataaaacactaacattcctaattccgtctcaacatctgcttcccagggaacctaactaacacaatactcctaaaaccaataccagcaaaaagtgactttccaagcccctacatgaagactcattttctggaaaataaaatttaatataattccaattacccatgacgctatttagccatttcaaaggaaatgagaaagcttcccaaattgtggtcctcatggagtgaactgatcatcaaatgttgctgtttacatgagggcacacaataattagggttgtatgtaacatgctactttcagattttcaggtaagtctaaatgcttttaattgatgcaagaataataagtccttcagttgatttatgtcatgcattaatatcaatcaaaaggttttctaacacatactttttaatactataaaatgtggggttttttttaatgtcttttttttcttattcagagccacatttcttcacatggtatgttttacctaacctaagggttatgttgttcgtttgtttttaatttcaggtttgaggaatcaagtaacaggtctttctaaatccttttattggatatatgttagttttccattatcataaaagactgaggaacaggaacagcagcatattgtttaaatgattcacaggtaaaaatatcttctccctcttggtctgttttctttcctgatgtctttgctcattgccaacattgtctattttatatataattcttgcaggacattgtgccctgaaggtgaaattggacaggtaaggagatgacccaacaccccttgtcacacctgcaggctctaggtcacttttgtaacacacaatgaaatgggtaaattctacacaatcctttttttttttttttcaaacaataacagaaagtaaatatttgaactgggggctttttcaaacaacacaagtcagaaaaaattgacttgtttttgactgttactttaggcatatatttttgattaatgacaattaaatgtaaatataaagatattttaaacttgaggttttaaaacaaagaatgcaagaatcacctggttaaagttagatattttgtcagtctcaaagtcagttggctggataataccatatcataaaattttataagactaatttgaaggtccatatgaattggtattattgttcgtttttcaatattgatcttagcagtgtatttacagcatacagcagagttaatgtttaatacaaacaaacaagactttccagaaaatctacaaagaatcactaactaatagccatgcttcagttaaatttgtttactttttaaagtacattctcagaagtaacatgtactctcaattaagtaaaacacaaccagaattttggaatttgatctttaaaataataaaaaaactttctctgctatttacagccttggttaaaatcccaacatctggataccagaatctgagcagcaaaatccacggagacacatgtgcaattttatgcctgcaagctcactattatttagaacgaaaccaacgtagtgcatctacccttgtttcttgctacacagaatgtatccagagtacaaactaatgtagattattataaaactcagtgtgtagatattatatatatatacacatgcatacatacacgcacatatataactaaaacaaaatcttcaaaaataatactttttctttctgtatgtgatgtgccctgatagtttccactttactccatcccatttccttttgttaatactggccttgactcacttagacaaatgggtcatgacctgtagtttggaaaacagggctttccagcctggctttaaagaggctggtcctcaggccagcagaaccagcagcacctgggggtagtttgtggcgcacaatctcaaggcctgccctagacctactgaactaggatctgctcttagcaaggtccccaggtgacttatggatgtattaaagtttgagaagccgtcctcctgcatgcaaaagtacagaatgagtatctgtgatctgaactacatttaaatcgataatgcacctcttaaactgtctttgttcaaagaacttctatcctactgagctcaaggagcaacacagtttctagcaagataggtgcaaagaaaaattcactttcaatttcatcaactgcttcaagaggttgcagggactggctgacctggtatcccagctcctgcaggaccgagagtgtgggaggtgggttgaggggaggtactgaattgactgcaatagatccatgagcatataaaagtgtgcgtgtttgttcttattcctgggagaaaatatatagtattcacctaattttaaaagagttttatggtttaaaaagttaagaagagctactaagccatgaaaagacgaggaggaagcttaaatgcacattactataccagataagaaaatctgaaaaggctacatagtgtatgattccaaccatatgacagtctggaaatggcaaaactatggagatgtaaaaagatcagtggttgtcagggcctaggaggtcgggagggatgaacagacacagctcagtgaatttgaggggcagtgaaactaatctgtatgatattataatggtggatccgtgtcatcacctgtttgtccaaacccacagaacatataacaccaagggtatacggtgtttatattaaagtataaccctaatgagaactctggactttgggtgataatgatgtgttgatgtaggttcagcccttgttacacgtcagccacccatgtgggaaaatgttgatagtggtggaagctatgtatgtataggggcaggaattatatgagaacacttgtggtatatgctcaagtctgttgtgaacctaaaactgctctaaaaaataaagtctgtaggtatctatgaaagcgcagacacatggtccgtgagagcacgtcctctctgctataaattggttgtatggttacaatcatacctagaaaggagagaaaataaagagtaagtgaataccgacatgttcaattctgccccagaatacaacaaagtccctgaatcactcttgtttcattgttgccattgcttattcaattcagtcaactcgtatatgtgaagcatgtgctacatacataacgtataatgcaggatgcaaaaatgattatgtgatcacttcaagtaatttataatctagcaaacatataaaacaggcacacagataatccttacatagtaaatgcctcctttttccccaaaatggcaaggagacaaatagcaaggatccgaggacagagaggcaaaattcagaaggccagaaaggcatggagccagaaatccaattcactcgcgagtaaggtatcgggagagagtggtgtacaacgtgacagggacacctgttgctcccaattgtaatcttttctgattggtttatgcccctttccaattactgtgtccatgctaattatcaactatttttattatcaaccctgcagaggggactaagagaaaaaaaaaaactgctgcaaagtgatgctgtgttcattttgcacagaacccagaaatcctgatgaaggaaactgaattggatgccacaagccttatctcctgtgaatgctgaatgactttgtcggtgggttttacgataagatgtactttcttttatatctattaaacaagctatacagaatactggtaaatacacagaagtaaaaagaagaataaaatagataaaattttctaagttaaaagctaagggaaaaataaaaagaattatcaattgatgtgatcaaagaaaaatgtttatctcatggggtgttggaaaaggaacatcataaaaattaataggtagaataatcatcaaaaacaatctgcacaacaaatattacatagctgaggggaactatcattaaaatataatgtatacaaattgctgagaaactcactacaccttctaaatcatgtcaaaagagttgtttgcatataagctgtctgcacttcttctctctctctctttttttttgttcatattcactgcaaggtggcttttgtccacccatgcaaatcactcatatgaaggtcacaatgatgtccaggtggccaaagcctgtggctaatcctcagtcctcatctcaccgagacagcagtttcttagcccttctcctacctccactggcttctcttctcagctcctctgtagttccccctcctctttccaacctgtatgcattggaggggcccaaagctcaaccctaatgctcttctgcatcttggtccctaggtgatctcacctagtcacccagcctcagatagccttaggcttaggaatcacaaatatatctctcacatgacctctagactcatatcaacctctcaacatcacaatttggatatccaacaggcatctccaactcaacacagccaaaccccacttttgacttcctgctcattgcaactgtcccctcttgcagatgtcccttttagagtaggtggcaccatcatatacccagttacaaacaaaatctttaaagtcatccttgactctcctacactgcatatctaatccatcagcaaatgctgtcttttccaccttcaaagtagatccccagtctgatcatttctcactacctcccctttcgctgcctggtgcctggcaatggcctcctaattggtcttccctgtttcaactcttggtccccctctagactgttccccacacaacagccaacatggttcttttagaacttcaaccaatgtaaattatacttcaagaaagctttaaaaaattcaatcagatcacatctgctatgaaccttccaatggttctcctcccgcagtgtgccaaataaaatggaaatgcccttatccttgcttaacagaagtctacaacacagcctcaccagcatgcctccaactcacatcctgcagctttaacctcactccacgccagcccccagtctccttgccgttacttgaaagtgccaggagagctcctgccaaagggcctttgcacatgctgttccctctctctgcaatactcttccccgtgtgatcatacggctcatgctcccactcccttcgggtctcagcttgaatgtcacctcctccctatgaccttccctaacctttcgtgtaaaattctacctctcccttcctcagtctcttgcttctcctgctttgttctggagaataccaaccagcaccacctgatttgtaactattcccttgagcacattctatctcagccacgggaatggaagcttcatgcaggcggggacatcatctgttcagttcatgctgtagcccagcaattctgaatgattagattgaaattggatccaaaaatatcacaaatgagataacgtaacttgttgataagtgtgtgaagagtatgaagagatgatcaagctcacaagtttccaagtgctaacatctataaaactccattgtcacccatcaaatcagcaaagattaaaaaccacaatagaatgtgataaaatagtgctctcagatacttcctggagaagtatagatgggcagaattgggtgatctggtatcaatgatcattctttcataccaatacaccatgggattttgcgatcagaaggtaaagaagacacagaaggaaaagaaggtgaagattaaaccagcaaaaacccataataagtaggacttcttcctattcattagtaagaaagagttgggtgtccccatgggaaaatgctaatttagtgtcctgaaccactgtaccctccaattcctgcttcccccacaacagtggccccacactgagtcctacaacgaggataatgatcctcaacccccaattgcacagacagggctaagtcagagacagtgatgccaaccttgctgatgtctctaaaacactcaactactgggggctaaccctaagcaaaattattgactccgattcctaagttaatttcctataaggtggaagaagcaacaagtgtcacttctcttctgggctctatgacaccaaatagtggagccgaagagacttgctgatgttttgaaacccaaggccaaataatgctctctaaacccttagaggtgtgactaggatattcacagaagccacgcaaaagacagcagccttcaatgaagaaacaaagaaacaaaaaacatggttccttttataaatatttatcgattatctaaggctaggttaattgttgataactatcaattatctgagcaagatacgcagaaacacttcaggtgcttgaactgcagcatcctgggctccaacccaaacttactggagaagaagctttagataccaggaatctgcattttaaccaactcctcagggaaactgccccagagggggtctaggctaaccatgcgcaacttccacccattctcctgggaagtgattgtgaatctcctccaaacccctcttacacttcctgattaagttggtgccccctactgaatgtcagcctcactgaatcttaacgaggaatcgccagactgggggggggattgtgcagcatgtctggggaacacttcactacttcactaaaccctgctgcacacatgctgaacaccgttccaaaggctacaggaactgagcaccgcattggaatctggccctggagggtgcccagcatggcgaccctgaggggtgcaggaacccagtgagaaggagaaacagaaggtacagtccagctcgagaccacgcacataaagaaatctgtaggcagggtctctattattgtgccatattaaatatcttgatattttaaagcaatattatttttctgattataaaagtactcattgtagaaattttaattgtgccatcatcctgcagaaaaatgaaagtacaaaaaacgaaaaagcagctatacacggccacaaagtcacagggctcatcgggatgtgctaaccaggctggaaactgatcaaagctgatttattgagaaaaaataggcagcatatcaaagacttacatcagcttcatagtagacagactttgggggcgggggaactctgtctcttttgagtatattctcaaaaggataaactttcaccttcctgtgaagcacagttactataaatcagatttgcaaactgtgagaaatgcttacaactcaatgagtcttttgtcagccagtgggggctccatcgtgaaatccacccttcgccatagcgatgggataaatcatcaccagccccgagacatcgcctaatcccttcctcgcaaggcagattcgggcgctttctgcatctgcttcgtgttattgaaaagagctcggctcatctgctgggctctcaggcttcacagtgacctcgcacagaacgctgctacttctgaaactgttttagactcttccgtctatgaaacagacacagagtttaagtttagcgtcttttatggtcagaaatatttagcgttacttccagagcggcagccgtggaacaatgtgggaaagaagtgcttcagttcacttcttgggaagtactgaccctgggtcaatttaattttttccgtaagatttccccttcttacttttctccttccactgctatatgtaacagtatctccccttccactgctatatgtaacagtatctccccttccactgctatatgcaccagtatgctagtatacaacattatagattaataatatgctatattgtttaaaaatattaatgttatataattaacatggtgtgcatattattatattgacaatacgtaatgtgatgtgataataagtctcactgagtgccaggcaccgctttgaatgctctaaactcattagctaatttattcctcgtgattctatggggtagatgcactatttcattcccattttacagctgaggaaactgaggcagctagtaacaggtggagccaagcttcacactgagatcatctggccccagcacactcataaaaatgagcaaaagtataaaagccaaagggaaaaggaagccaaggggtgaaaatcctaattacaaacaaatcctgggtaagctgggtttttagtccttccccacatgtgaacagcaactagaaacctgaacagtgactttgtttcccctgtcatccattgttggtgcctgatcctcacacaaaatcttacggagcagtatctagtgattagcttagctgaattgagcctggacacccttcatgagctggaggacagaggacgtgtcgatggagggtccaacttcaggcatctgtactcgcctgctacaggtgagtggacctatgaacccccagcctcatcaagcacccgagggtcacctgcctgcttcacctggaagagacagcaaggtgtgatcccaggaagatcctctgccaggaggcttacaggcagaagcagcggctgctgaacatagatgctgtcggcaggacacaggggtgatagggggtgagccagtggagcaggtgaaggtgcagactacaggcagcccccctgagatcctgcccagaccccagcagcagctcccctgtccctctctagcagcttcgctgtgcccgaagtgtttgagaacaggtgacccatgccctgagtggcagatgctgtgtctttttgatcccttctctccctccccccccacccccagtggggtacatggaaggtttgctaaatgtttgttgaatgaataaacgagcccaagtcagaagcagtctccaaatcattcctcatcgcaaaagggtgcggtggaaaaactcacaaagccaaggcaggaggacacactcaacttggaaacggcccgtgcccagctttggaacaggcacagcctgagcttcaaggaagtcacttgaccagcagtagctcccacctttccttgcagctagaacagcatcagaccaagtgatctctaatgtgatgatttgctaaagtacaatgagttttacaactagaaagtaccttcctctcaagactgacttcactatgagccacctaatttttcctctctcttcttttggtatttttgttgcaaatagtacacacaaaacaggatatataatctatttgtgcaatttaaagaataagaagcaaacacctttgcaggtactccctagtccacaacagtcagccccaggacctcagaagccccttatgcctttcccctaaaactctcccctccctgacaaggtaattccaatgctgagttatgtggttttttttccttatttttcttttcaacacatattacgtttctctgaataatatgctttttaatgttgcctctttttaatctttatttgtggaatcatattgtatgtaatctgtgacttttttctactcacatatgagaaccatccacactgatacatggctacagatagacacttggagtttatttttcactgctgtatagtactccattggtggagtacaataggtttatgtatccacttttctgtagatggacacttgggttgttctgtttttgctcatacatacctcctggtgctcaggtacaagggaatacagacccagggtgagactgctggatcacaggctaggcacatcttcagctttactaggtaacaccaagccaatacaaaagtgcttgtacaaactcatgctcctgccagcatggaggacccactgtgccacataaaaacatcactgttattaacttgttttatttgcatatgattattttttcccttatccccaaccacttctcaaagcaactagccagcatgtgccacacaggcaagcacccactccaatgtgatctatatggttaggtatgtatgtaccctggaaaaccctgtgatgttgcttgaggagtatataacttttttatgtatgtaagtagcatgtgctacaaagcgcgttctgttttctgtatttttcactccactcagtgttttgtaaaacatgctcatgttgctccataggtatcagagacaggatgatgttttatctttaagatgggtacgccaccctcattttatagatcacagtgatagctcacaattgtttagtactcagtggggtctaaatgtactaactcgtttaatctcccacgaaccctgcaaaacagatgcttccgtttcatataaaatgagaccaaggcacaaagaaactaaggaacttgtacaaaatcaccaagttagtaaacatcagagcaggatttgaattgagccagaatgtgttcttatccacgacatgaaactggataagaatgcaaagctcagagaattttcatgactagcatctctgggattcacagctggcgaccacggagcagaactaatatacagatggttcccctctcagtccagtcctcattccatcggctccaaaatgtgtattattctatatgattagctggtgaacaacaaaggcaattagttagtcctcttcagcaaatgttagtaaatgaaaatattatagagacagaactctttttaggaaatgcaatcatgtgaatttaaaaatgctttatcagaaatagaattaatgacaaaaatatttataggatcctaagaaaatggatttgctattttttttgtcggctgatgataatcatctgggtgcatctttggttgtgacagctccaccccttcagagagttgtatcttcatacacacctaacatgctaagagtagatgtgcatgatatggtagttagtataatttctgtaataaaaaaagtacttggtcatgcctgtaatcccagcattttgggaggctgaggtgggaggattgcttgagcccagagtttgagaccagcctgggcaagatagtgagaccttgtctctacaaaaaaaataaaaattagctgggtgtagcggtgcacacctgtagtcccagctactcaggaggttgaggcaggaagatcgcttgagcctgggaggcagaggctgcagtgagccataatcataccactgcactccagcctgggcaacagagcaagactatgtcttaaaaaaaataaataaaaataaataataaataaaaaatttttaaaaaaggtacctggaacggcctgcaaagaaagggaaatcaaattatgcttcaagacagtcactattatcactgacagagaagcagctaaaataaacagcctgctcattttgtttgtaaatgaattgccacaattcttgcactatttaaatcaagaatattttatattccatagttttcaaccacccctcctttttttattgtttccagctccttaaacatataaaaggataaaagccatttgttctggcagaaaagagtcatcataaattttgcagagtgaatttctctaagatgaaaggaatgttcctctcctccaggacagcctacggacaggactgtgatgacacagagtcttcacgggaatcacacctgcagtgttaagccacttctgtggaaaactcaagtccttctcagataacaaaaacattttagtagcaatgaaccaaaaacaaaatcttccactatatatgttaatacatcaaaaggaaccattcatgtgccatttataagaacttccttccggccaggtgcggtggctcacgcctgtaatcccagcactttgggaggccaaggcaggtggatcacgaggtcaggagattgagaccatcctggctaacacggtgaaaccccgtctctactaaaaaaaaaaaaaaaaatgcaaaaaattagccaggcgtggtggcaggtgcctgtagtcccagctactcaggaggctgaggcaggagaatggcgggaacccaggaggcagaggttgcagcaagccaagatcgcgccactgcactccagcctgggcaacaaagcgagactccatcaaaaaaaaaaaaaaaaaaaaagaacttccttcccagaaatcatagcagcgttcctcagcccaaagccagaagaaacttctcgcacatgaaattttacttcaaaaactcccatatcaggcattttaatgaatcagtggaagaaaattatcctcccaactttgttgtcaagaaccccaatttcatatgcagaaaaaagaattacaaaaataattattcgaattctaattggtgggattttgataggtttataaaggaaataaatatctttaacacaattctacctcgcagccaacatcagctattagcaaccacacttcttattgccagttcatctctccaaacacacagaagccatgtgagttgaaatttattttttaaaaactctcagttatgatttctcaaaattatatttcatatattgacatcaaccaatatgatgatgatattatatattgacattaaccaatacgatcaaccaatatgatgataattgtagggaaaagaaagagagatctgactgttactgtgtctatgtagaaaggaaagacataagagactccattttgaaaaagacctgtactttaaacaattgctttgctgagatgttgttaatttgtagctttgccccaaccactttgccctagccactttgacccaacctggagctcacaaaaacatgtgttgtataaaatcaatgtgtaagggatctagggctgtgcaggacgtgccttgttaacatgtttacaagcagtatacttggtaaaagtcatcgccattctctagcctcaataaaccaggggcacaatgcactgcggaaagccgcagggacctctgcccttgaaagcggggtattgtccaaggtttctcccatgtgatagtctgaaatatggcctcgtgggatgagaaagacctgactgtcccccagcccgacacccgtaaagggtctgtgctgaggtggattagtaaaagaggaaagcctcttgcagttgagatagaggaaggccactgtctcctgtctgcccctgggaactgaatgtctcagtataaaacccaattgtacatttgttcaattctgagatgagagaaaaaccgccctatggtggaaggtgagacatgtttacagcaatgctgctttgttattctttactccgctgagatgtttgggtggagagaaacatacatctggcctatgtgcacatccaggcatagtaccttcccttgaacttaattatgacatagattcttttgctcacatgttttttgctgaccttctccttattatcaccctgctctcctactacattcctttttgctaaaataatgaaaataataatcaattaaaactgagggaactcagaggccggtgccggtgcaggtccttggtatgctgagcgccggtcccctgagcccactgttgtttctctatactttgtctctgtgtcttatttcttttctcagtctctcgtcccacctgactagaaatacccacagttgtggaggggaaggtcaccccttcagataataagataaatcagagccgaaaacatagttcattcctgaaatcaaatatagaacgtttctaccaacacacattttcaaagatggtgttttcaggtttgtatgggattgtttcacctttatgaattagctttttaaaacctgtaatactttcttgctgacttcatcatttccttctggttgcctggaggggtggtgtggaatgctaataaaatgaatttcagttgccgtccctcacaatctgaactatagaagatatttattgtctcaacttccctatgagcttttctttgcatcatgcagcttcatggtcagcagacactaaaaattaaagaaagtctttctcccactttacttgtgtagcacagacacactgatcaaatatgttcccagcacttccgaagaaaccttatcacatccacaagagatttcctacttgcactttttttgataaacacaaccatcatagcccaacaaaacatcacacagaaatcaaattatagtgtccccataagcatctgctcctctatggccttgggcaaaatttagaatcctcgacatccctagagttaccacaatctctgaaagtgaaggagcacccacaaagctcaaggaatgcattgaaactcttattacttccaattccattttcaaaaaaagtaaatgtgtgtgtatgtgagctgcacatggtccagaatgcctcaccaaatgtattgttttaaaatgtgtgtacgtccatgtgtaattgtatgtgtgggattttgaaaggctttttatattttattcaaaaaggtacacttttcaatatcacaaactttgctttcaattataagcccttcccattttcaattaatgttttaggcaaggaatatacattagtaaaaccaaccacaccacttagggaaaatgaattagtatggggaaagtgaagaactggccatgcagtcaattactttggccagcatagatatagttgaactaaccagcacaggtgtagacagcctgtttggataaggtagcttaagccccaattttttctgcagtctttatttttgtcaaatatatgaaaactaccatctcatttcctccctgtagctattacccacatgtatgtgtagtgtcaaaataaatggccagagtcctctcagggacctcccttggcacaagtcgcacttcctcaccctctcacctccagagcctcaggaagtgcaggtcagaaagcagccagggcaggtgtgaggtgatggagcgctgagtgtcggcgagcccagataaaacaacgttccaacatcggaaatccaatcattcacctacttgtctcctgctcgctaaccccaggcaagtataaaggagatggaattataacaggagttagaagaatttggatgtgatttcatatattaactcagcaaaattttttctgaaaaggtccagacagtaaatattttcagctggcaggccatatggtctttgtcgaacctactcaactgtgccattatggagtgaaggcagccacagatgatatagaaatgaatgcatggggctgtgttccaataaagctttctttatggacactgaaatgtaaatttcatgcaatttacatgtgttacgaaatatgcttcttttgatttttcaaccatttaaaaaagtaaaaaccattttcttagctcctgggctgtgttgactgacccctaattaactgatatgtgggctgctatccatgaaaacctaggcacagaggaaggcagagctggcttcccagccaagacgggacttaccttgatatgagctgctgggtccgggacagtctgaatcatgtccttcagtaagccagcccatctaccagctgttcagaacctgacggctagaagacaaaaggaacaacatacataataataaacaactgcatttctgtgttttatgttctagcaggacaggacacaattcaccaatggcaaaagaatcatagctttacattaaacatgtttgcctaaaggcatcctctaggtacgtgtggtccatgaggtgactagataactcacttcccttccattgggaaaatcacttacaatgagcccaagagaaccctagtccgacaggacagaagaatctagctcaagctaacccacatcacatgcagcatccacacatccttccacgtgggcagcatctaatgagggatccattaaaggaagacgtgggactaaaacagggcatacttctctatcatactgagaaaacaggactttgaaatcccaccaaaactcatgcgatctgcacatccttttcagctttgttattaagttcttagtaaacagcacagctaccattcattgagtacttcagcgccagttccttgagcgctaagggctccacacacattttctcatttcattccaaccacgactctgagagctgtcattcccattgtccagctgtggacgtcaagactcataaaggttactgatttgtccaggatcacctggttaataagcgacagaaccaaacttcaaatcagattaggctatctgactccagagcccaaaaaaaatttggtttgacttaattagcaggtatcaacccacattttgaagggacattttaaaacaccgcttaaataaattaaatttaaagatgcctataatccaggaattttccagaaataaatacttcatccaatatattcctttattcaaattataaagcagcatgttctgaccactgtctgtgccctccccttccaccgagccagtctccaacctccctttgctgtcacaggccccagggctgacctctacagatgggctcagcagggtgccttgcctcctggccacctgtcagggttggttgacgtggccccctctggagagcaggggtgagaggagaggggtatctcttcccctcaccttcccaccaccgacacctgccgcccaacctccctgggcgcttggttatggttctgactgcagctggattctagggggacctctcccgtcatggggcccctccttccaggctccagcctccagtacctggtccccagccagtctctggtgctctgcagatctcagccaagccatcagttcttttttggcactaaaaatgccttttttagtttacatttttagaagccatcacttgctttttatcacctgtagttttttgtttgttttctcctttacaatggctctttgcagtaacaaatgcaaaataaaaataaacaatatgattacagaacttgagacattttcgaaggctgtctttcaaatttgctactgagcgcattactgtagtgacaagtgaaagcattcacaggagtcctccccacattcacatctgtcctttctgacctctcacggtacaggcacacccattccaacccaattgcctctcatgaagagcatctacctccagatctgcatgctccacatctgtcttcagtctccctggaggcctcccaagattggcggagcttggctcaccaagaagatgacatgctgggaaccttaggcattttttttctataaccaaatttctaggtcttggaaaatatgtacttccccccacccccacccccaggcctaaagtccctctgggggatgagagttactgaaagtacagagggagtgaagtgcagtcctgaaattgaaccgggaagcagatgaaggtgaccaggctcctggtgctctcgtgggagaagaggctgggagaggatggggcctggctgaaggtttctgggagcataggaatcctcaactccccttatcctaagagcagcaggtgccacaggaaaacaccactctgctcctggggtcattcagcccggaaggggagcgtctgcaagccatcctcacaaagggagggcgtcccactgcacaaccctgctctggggagcacatggctatttccgtatgtctggacattctctctggactagttcactccgcacagttcctccctgcctgcacacacatgctgacgctcacaccagggactgaagctcgtccccctcccctcaaacccaggctgacctgtggctgcctctgacctgcagaacacagcagagggaaggtttcaggagtcccaggctcaggcctttatggaagtgggagcttccccttcctgcctcctgaaaccaagtccccataccctcagcagcacagcacatggcagaggaccgagtgcccagtggggcagccagcaccaacgccaggcccgggagggagttgtcctggacagtccagagaactgactctcagatgaccacggcccctgccgacatcagggaggcagcttccagctgagtccagtcagcccacagaatcatgaccaataataaatgggttgttgtactaagctgctaggatttggggtagtttattacacacacaggtcattgaaacaccctgtaagtgctctagaggcacggagaagatagagggtaaatagcttgtttcactgtcactatggataagtacaaagatggttccaacactcaactcctcctgtacccatgctttttgccacataactttgtgattcttcccattaaagaggtagaattacttcccaacccttatttttgggcggcctatatgatctgcttcagccaacaggcagtagcagaaagacaagtatgacagatcctagctgaagcctcaggaggcaggacatgttcccctttgcttttctgtaactttccaccagcatgggaacatggccagatgcatgcgggaggatgagaggtacctgaggcagagtcacccaccccaatcaccccaccaagactacgtttgatcatcccatagacaaccaaaaccccagacatgggagggaggcaaccagaccagccgctagccaagtccaaccagaatggccaacccacaggctcatggctgaataagtgcttactgcttgaagccactgaaatttggggaatttgttacacagcatttttgtgacaatagattactgacatacactttgcaatgtacaatcagattaccgagatcttcgttaaaatttttctagccagtgataaaaggagactcaaacagggcatttcaaaggaagccacttcatcccaacacagagacataatatttccactcacctacgagacatgatctcaaaccctaatcctgccctcaaaatgggtttggaaactgaaggataaccaagaaacctccaccagaagcctccatgggattcccagagcccttcccaggagcaactgaattctcacttcacatgatgccctgccagcctcccctggattccaaaaatcaaaacatccttggatatccaagaccgcagcaacatcatagaagttacagcagccactcggtctgtaaccaaccaagacataaactaaatgagcaactgtttgagtctcttgtttcttatggggaagttttgagtactcaggttgcatcaagtataaaatgacagggaagggaatagatagagattccagatgcaacacagtcctgatccttgagggatcgagatgggaaacagatctgtttcatacagatatgaagcggtcagtcctgagagcaggcagttagtggaggtgcccagtgaggcgtgtggatatacctagaggaaagagagagctgattcatgcagagacaagagggtgccaccaaggagccttgatgaacaagaagcatgaggactggaggaaagagggtgaaaggcatgaagcagggaacctaagtttctcccagctctgccacattagagaccaagggcgtatgagcttctcacaccgccaccaccagagtgatcacacaccaaagggattcactcagcacgcagcgtgatggcactgccaccctccacaccagctcagcgaaaacccaacggacctaaagaccaggagaataaaagctcaaccaccctcccctgcctcctcaacccacacggatctctgactctttttttttttttgagacggagtctctctctgttgcccaggctggagtgcagtggtacgatctcggctcactgcaacctctgcctcccgggttcacaccattctcctgcctcagcctcccaagtagctgggactacagccgcccaccaccacgcctggctaattttttgtatttttagtagagacgggatttcaccgtgttagccaggatggtatcgatctcctgacctcttgatccacccgcctcggcctcccaaagcactgggattacaggcgtgagccaccacgcccggctaattttttgtatttttagtagagacggggtttcaccgtgtcggccagatggtctcgatctcctgacctcgtgatccacccacgttggcctcccaaagtgctgggattacaggcgtgagccaccacacctggccctctctgactctttttgcagccatttgagtgcctgttcttttttaccatttcagaggtattttatggattttttaaagagtacttctaatttacttttgtgttcctaatggtcatttctcaaatatgtagtagttggtaaccaaacaaactaaaaccatactaaaaatttttagtagttggtgatagtttcatgtcactgtaggaacctttttattttctattttacctgcctttgaacccttgcagaacttcactctatgttgattgaaaatcatttctttaatacttgtttcttgcaataaactcatttgctaaggtatatacttccatatgattttgtgtttcatgacccagctatattttattattgggtatcttaaagaaacaaaaaaggccttaacaataacagaattctacttgtgtcacttctttgtttttgttttcaaaatgccaatgtcttactaaatagaaacaaacttgatttgaattacgtaagctctaaccacataaaaaagatggactggtacccaaggtagaagggaaaataagcattttgtaattatggaggcagtattgcaaaatggttaagagaaggcctaaatatttgcagggctggtgcaagaaaatagatggaagtttgagacccctcgaccctacccctcctctcttctcaaacccaattgtgttctgcgggttaggggatgcatatagtcacgtggacatcccgatccacatggccacactccattcagcaatgctccctgctcatctttcagacccagggaaacacacacaagatcttcccaagaagatgaactccaggaaacaggctggtgcagcccaaaagatgctcagtcaagtttggaaaggcactctgggtgccccagcacctggggcatgtcctggaatggggatgggttcagctggggagggcaggaatggggcctagaaggcataggcaggacgctgggctgggggcagtgctcgatatgagcacagtgcagagccagatgagggatggaaatcagatctgccacttactccttggaaacctataaatgatcactttatcctccaagagccttagttacacatttgcacaatgaggataatattactgtagtataataagaactccatttgcccttgtctctcgtttctggcatggagctcctaaaactctgggaatttcccaagtgatgggagcatcttttgttctaagaaggcagcaggttggtgagtccctagatagcttcaggatgggggctaattgcaagaaagagtgagtcttgattagatgctcagaaccttcagccccatttcccaacctctcaggagaggagaggagctagaaattgagttgatccccagtggccagtgatttaatcaatcctgcctatgtaacaaaatctccataaaataccctgacggggttaggacagcttctgggctggtgagcatattggtatgaagagtgtggtgcaacccaatgctaaagggacagaggcggccaggcgcggtggctcacgcctgtaatcccagcaccttgggaggccgaggagggtggatcacgaggtcaggagatcgagaccatcctggttaacacggtgaaaccccatctctactgaaaatacaaaagattagccgggcgtggtggtggacgcctgtagtcccagctgctcaggaggctgaggcaggagaatggcgtgaacccgggaggaggaggttgcagtgagccgagatcgtgccactgcactccagcctgggcaacagagcgagactccatctcacaaaaaaaaaaaaaaaaaaaaaagggcagaggctcctgtacttggaatccttccagaccttgccctgtgcacctcttcatctggttgttcattcatatgcttaataataaactgtaatcataagagcatagcgttttcctgagttctagcaagttgttgcacctaaaaggggggttgtgggaacccccaatgttgtagccatgtcagacagagtgtaggtaacctggggacccaatacttgtaactggcatctgaagtgaggacggtgttggggagctcagcccttaaacccatgtgctaacttccggtagtcagtgtcagaactgaattgaactgttggacacccagttggtatcagtgttgaatgactggttggtactggcgaagacatgatgtatttggtgttgggaaacatgaataaaaaatttgtaaaacctccaaacgatgttcagcaattcacaaaggtgtcagtgcaagagttggcctgtatctattctaactggtcagtatgcaagttgaaccattgtttgattatctcctctgtctacaccatcaggcttttgtgaggattaaactaaattatgcctcagaaagaaaactctctcaaggctaggcacataatcaacactaaacaagtggtaatcattataattaagaaagtaaaaatatttcaaatggacgattttgatactgtataaaatgttgcaacttttttttttttgagacggagtcttgctctgtcgcccaggctggagcgcagtggcgcaatcttggctcactgcaacctccacctcccgggttccactgattctcctgcctcagcctcccgagcagctgggattacaggcacgtgctaccatggctggctaattaaaatgttgcaactttttaggaaaaataatcctcaataaataaattgctaattttcataagagccctttgtcaactgactaaaaacatccttaatttagaaatgtattttttagttttaagataactagtcattaagtgaaaacattgtaggcaaaatggctctaagcaatttagtattcataggaatgaatccattccttgaaagcattggtcgctgggtgcacttgtcctggatgagcagatattaggcaaatcagtctttcaccagcaaaccctgccataagaactgcacaggcctgattcctgccaagcacaccaggcccctgactggggcagaggcctcccttatggggcaggaagaaggaggcagggagaaacatagggcccatgatttaaggaggctctccctctcaggctcatgcaagtgcaggatcagtacctaaaggggagcaccgcccgaaatcctgtgccccagtcaccttaacccagtccagccctggctcctgcactccaaagctaagcagggaataccagcgggagacagaagacagcatgagaaactgaatgcatctcccacatttatctaaaaataagaaaatggacttcttcagtaggaaatggctcatctttccaaatgaataaaaatacttatagctatgggttgaattgtatcaattctctcccccagttcatgcactggagtactaacccccggtccctcgggatgtgatgatagagaggtagggcctttacagaggcaatcaaattaaagtgaggtcattagtgacctaacccaatgtgactgatccacttacaaaaaaagggacaagatttaaagacagacctgtatagaaggacgatggtgtgaagacacagggaaaagacaaaagaggcctggaacagattttcctcaaagccctcagagggaaccacttgggctgacaccttgatcttggacatccagcctccggaacggtgagatgatgaatttctgttgttttaagctacccagttcatggcagtttgttacaacagcactgggaaaggaaatcacctctatggagggacttacgaaagtcacttaactaatgcagattagaggcctcacagtcagggcatggcctcaagagccacatccattttaattgtaccatttctcactgaactctgaccctggtcaaggcatgtctcaggctccatggactactattccttccactgatcgaccctggcttcattctggcaagggagggactcatacattctgcggcctgcatgagtgtcatgtgagcacccccataaccttgatccctgcggtgcttctccaggggagccctagcattccagctggcctcatgggcatgccttagagagagggagctgaccctctccttcttcaactggattttatttttattttttggcatgttttgtgaatacaaagattcactgcctgggtgtgccccttgaaagaaggtttcaattgcattcaggtgaaataaccacaaaatgactgtaagccaaatgtagtagtatgatagaaaaatggaaatatcgtaaaagcaccagtctgtagacacctagcttctggttcctctggaaaagggagaagagagtagacagtgatggagaaaagaggggctgtgaagactatagaactgagaaggcagtaattctaaaatctccacactgtagggccaggaacaggcagtgctgggcaatggggcatcttatctcagggaagtcaagggtgtcatgtagaaccaacataattcatccaagtacagcaaagaatccagaaatggtctgtggaggtttggaaccatgaaaatcaaataggaaagatacaaaatatttacatatccacattttttaaaaggggtcctgactaggcagcataagattatttgggttctgttcattttacctttagttgcccttggttctgccatcttttttctctgtgagtcatttgtcttgcttttggtcaacacggctttcctcgggtctccaaagatcctggaataacctgaatataagttgaagaatattaaaccttattttgttttcaaatattaataccagggatcaactgtacatgtaccgacaaaacctatttcttaaacattattttaaaatatcctaaaaggggaaagaacttaaatccttccccttaaaaaaagaggggacaacattcctctcctctgagggaagcccagcattatgaagcaaaaatcgggagtgaaagcaaggccaagcctaactggcatgctgaagcacacagatgcttttgcacagaaaatattttgaaaatgttttcttttccttatagcccccagctttggtaataatggcttccctagatcattctgttagcactttctgctgctcagaacagggtagtgggatttagaatttagaaaacatcccgagaactgtaattaagcaattgtcatagtcccagaaaagaaacaacccttttactttgtaaatgctaggaggatctgtattttttaaaatcttagaacactaactagctaaaaagatagaaagaaaaaaatctttcttacaatatgcctgtagcacggctccaaaatccagtccctctctctcttcttttttttttttttttttttttttttagatacaggaatttcttacacaactttccaagtaaaatattcaatccccaaataatatatttagtagaatccttacaacatgagaaattgtaaatggcatctgtttccgttgaaaatatttttaaattagaaaacatcttaagcactgcatcaaatcaatatttgtaatgggcagaattatttctaaatggttccacaggccagttgacattcccactctacttaggaagcccccagccaactccacctgaagtcttcgaaacctatgcatagaggcaaattgcccagatgtcacagaaaagcatttgttgtgatacagaaaataaaacacattactgggggaaaaaaatcagggtactaaaccacgtacataatatcatcccaatattgcacaaagaaaaaaaaataagtggatgaaataaaagagggaaggcaggaaaggaaagaggatgacctgagaaaagttatcaaaatggttaacagtcatggtctttggctttccagtgtgaaataggagttcttattttcctctttttaaaatatttttaaaattatttattttttaaaccaactaataaaagtaatatatatttaccgtgtacaacattatgttttgaaatatatatatatatatatatatatatatatatatatatatatatatatatatatatatacatgttggaatggctaaagtaagctaattaacatctgcattacctcacatacttatttttttgtggtgcgaacacttgaaatctactcttagtgattttcaagaatataatgcattgttattaactacagtcaatagatcataggtctattcaagttcaagtcacagatctcttgaaattactcctcctgtctaactgaaattttgtgtcctttgaccaacatctccccagttcccctacgctcaacatcactaatcatcaaggaaatgcaaatcgaaatcatgatgagtgtcatctcacacctgttagaatggccattatcaaaaagacaagtgttggtggggatgtggaaaaagggaactcttgcccaccgttggtgggaacgtagatcagtacagtcattatggaaaacaggatggaggttcctcaaaaacacaaagatcaattacaaaacaaaatactatatgttttacaaatgtactacaactcaatttggtatgtattacaaatcaaaatactacatgattgctggcaatcccactctggagatagatccaaagaaaatggaaaatgaaatcggtatgtcaaagaggtaccagccctcccaaattcattacagcattattcacaacagacaaggtatggcatcaacctaagtgtccatcaacataaacgcccataaagaaaagtggtgcacatacacaatggaacactattcagcatttagaagagaaatcctgtcatttgtgacaacatgaacaaacctggagaactttatgctaaatgaaataagccaggcacagaaagacacatactgcatcctctcacttatacatagcatctgaaaagttgaactcctatttccttctttatagttttgtgtattttccaaattttctaaaccaaaaatattcatctttataatcaggggagaaaactaaggaataatcattttataatcctaaacatgcttttaaagcatttatttcactgtaatgtattcttttcccatccagtcatacatgggcccaaggagctggccttccctgctcggcagcctgatgttcaaggggatgggggagggggacggtgcagtagatcatgctttgcaaagctgtgcaaatcttttttttttttttttgagacggagtctcgctctgtcgcccaggctggagtgcagtggcacgatcttggctcactgcaacctccgcctcccaggttcacaccattctcctgcctcagcctcccgagtagctgggattacaggcgcccgccaccacacccggctaatttttgtattttagtagagacggggtttcatcgtgttagccaggacggtctcaatctcctgacctcgtgatccacccgcctcggccaaagtgctgggattacaggcgtgagccacggcgcccggccaaagctgtgcaaatcttgagttaataaacatgttccccaaatccaaaagccaatattgactattgcttggttaactgttttgcatggataagtggttaaaggagtatttggtttccaatttctgcaaagggaataaaagttttaaaagcgtgaactaagatttcctatactatgctattctatagtaggtttttatgccaaaacctctactaggctgaaaggataatttgatttatggttgagacattgttgggcctgatttaaagcccagagtcaagcccagagaggattctcttaaatatgtgcaatgggtatttttaaattagcattatggcgttattaatatttcatttatcctgagagcatttacctgacaacgtaaattatgtgtaacacagctgagaagccacaaaggatccaaaaagatgtcacgaagtccacgaagagaagctttgccagagaaaggcacactaccagccgcgtgagctggcctcatcaaagcaaaaaagtcagaaaattatgtaaaccagactcaagaactcaaaaatacagtcgtttgagaacattggtaagagtgcaaactgctcaccccagctcaatcacccctggtccagcaacggcagaaagccaaggtcaaggagtcacatgacctgaagagacaccccccaccaccaccaccaccctccaagccctgcccctggccagtgggacaaaccacatgacccctgggattcagtattcagtcaggttctgtgttctgtatggggaggtagaagaaggcaccagatcatcaggaaatctggactggaaatggccaaagctgaacacatctgagtacctgaagggtaagcttaaggtgtcaaagcagccatggtgaggcagaaagaaccttgagcttggggccccaagtttatgctgacccactagcagccaacaaaacctccctcagcctcagtttgctcatctgaaaactgtgagtaagaggctctgactccagagaggtggtgcaagttcaatgagaaggggttgctgatggtccagatggacagatgcaaagcactgctttctgtttttgtctttgttttgatacaggattctctctgtcatccaggctggtgtgcagtggtgtcaatagctcactgcagcctggaccctccctggctcaagtgatcctcccacctcagccacccaactagctcagactataggaaaaagagtcatgcaccaccatgcctggctaatttttaaaaaaaaaattttggagacatgagatctcactattttgtccaggccaatctcgaactcctggcctcaagcaatcctcctctctcagcctcccaaagtgcttggattagaggggtgagctaccatgcccagcaaaggcattgttaaattcaggaatgaatgaccaccttgttccccaaaacactagacaagagaaccattctctacgcacagatctccctggccaccacgtgtaagcagcagtgaatattccataggtggaactggctactgtgaagaaagaaaactccagaaaagctaccctcactccaagaagtagcctggaccccacgtgcgtgacagcagcctggggagaaggctccactcccaccagcaatgccaaggacagagcagcagcagccgtccatccccacagttatggtgaacacagccacagagcagcctgctttttccatgtatagccacacacaggtggcaatggcagcagacgtaactggctgcccttcctcccttatggaaggaaacataattttgcttgggtgttctgcctgcccccacatgacccacggaggatgaccagccccaacaccagtgtaaatcctatcactgggcaccatctcttctcaccacggattggtttagggaagggcacatgatataattctggtcagtctaacactcggggaagcgagctagaggacttctaggaaaagtgttggctgatgaagaaaggccatagagtagtagtcctgtctgtgtggcacttggaactgtgagagccatcccaggaccatgagaagaggtcacctgaggataaaaccaatgtgctgtggatatctgggggaaaggagggaagtccttgtgtttctacctatggtagggaagagtataaaccaactctgaaggcatctcatggcagggcagctaggcacatcaaatgcattttccttgttaactaaaccattttgaattggggtcatttttgttgttattgttattactggcagcaaaagtatcccatacactctagtagccatgttcaaaaaagtcgctttcagctcttttaccatctgtatccatagtcacgcagacacgctgagtatgctcttcagttctaattttaaaataaaatgatctgctggaaattagctcagctcatagatctccatacttacaacaccgtatctaagaattagtaaataactattaccatgataagtggcctatctcagtctatccacatgttgagtgtccaggtactggaggtggcatggaacctcccctcaataaacaaaggctatgatgagaggttatactttaaattaaattactgagtggaggcataatgtggtgagggtcacaagagaggtaccaaagatgcagcaacagagcagttgatgggcacttagcatttcagtaagtgggaatggggaggagagcaggaaaggtggaggaaatagatgaggagaggaaagaagggaagtgttctccaaggaagcacgctgcagggaaagagtctttcacctgtatgtcccacaaggcacagagtatgaactcagaaatgttgaatgatttgtctctataattaagggatgatttcactgataatgttgtcttcttccatgatctaaattcaacctgcccttcaaatccattcattcatacaattgttcatccatccatccatccatccatccatccatccatgtattcatgtattcattcatctatccatccatgtattcatccatccatcatccatgtattcatccatccatccacccatccatccatgtattcatccatccatctatccatccatccatacgcactgagttccctccatgtgccaagcactgagctaaacactaactagggttgggctttgccaatgagttcagagcctagtgagagagacagagttgtaaagaaaaaaatcacaaatgccaactcccccattgccttgcttgatccttaatgccagagtgtagcttggttgagcatgacaatcagctggagagctttttaaaaacagaaattctgcaatccttcctcttttttctttattggaaagtccaggggtgaaaggggcaaaagagtctaagtgggagttagggaggcagaagaggattgaaggcagtgtctgaaatattttcagactgagaaggaaaaggaaaacagccaagaacacaaggaggagcagtcagagcataaggaggaaactaggaaagatctaagtcatggaagccaaggaaggacattcagtaagatggaaagttcagtgtcgcaactgcagagagattcatgtccaggagaaagtcattcaaccaaccatacgcattgagaacaggtcctggatttggcaacttaaaacctcttgctgtcctctaaaaatgttgtaggagcctgacagcattaagccaaatggctcagtagttaaaaacagggaggatatgcaaagggcaatgtaggctactcatagaagaagttgagcaacaaagttagggagggagtggcagttcaaagaaaagcactaatgccacagggtgcagtggctcatgcatgtaatcccagcactttaagtcaggagttcaagaccagcctggccaacatggtgaaaccttatctctactaaaaatacaaaaattagccgggcatggtggtggacacctgcaatcccagctactcagaaggctgaggcaagagaatcacttgaatccaggaggcagaggttgcagcaagctgagattgcaccactgcactccagcctgggggacagagtgagactcctcaaaacaaaccaaccaacaaacaaacaaaaccaaaaaaacaatgaaaacaaaaatgaaaagcactaactggcttcacccacccaacatttgctgggcacttactgtacttcagaaattactagtagctagggatgcactagtgcacaagactcagccctgccctcaaggcatttacaaaccaatgaaaagaaggtttatcttatttgctcagtctgtttgaaggatgagaaaagcaggtatgtttatagacaggataaagggagccagtggagtagaggagatagagattctagagccagggcacttaaggacgttactgtctggggaagaggtagaggaaatgccatgtttcacagcacaatggtggggtcagttctggcaggaaggtgggaccccactgtctcagaaggggtgtgctgccagatggctaacaacaggctctcacaggaaaactcctgatttgaagcacttggtcatttctatggagtcaatatttccatcatgggcaactgcaaggaacccaggggagtccctgaatgcagagttgggaaaagatgtgctctaacgcatcattgccggctctagcgagttgggaggagccagctctagcacacatgggctccagaagccaaagagagaccaagaagcctggaactgttgataagaaaagagtgttcagaggaaagctgtgaagccagcatagccagctgctctcctaggcgctgagaccctgtgatgagaggagaaaccagggaggcggagttccaaatctggaaaagtggcaggcttgagtgctcttcagttactcccacttgagcaattttgctttctaaacctggttaatagcccaaaatgtgggctgcttattgtcatctcccttcactgtgtgtgtgtgtgtgtgtgtgtgtgtgtgtgtgtgcttttcctatgtaaactgctgcaccactaactctgctatactttagaactcagtaaggcaatccttagactcttatacaattccctaaagggtccccttttactctaagtcacagagaaatgttgaacatttaaacctttaaagtgcagttttgctggaagaaaatttcaagggtctccatgaatcatgtctgagccatgtattggccatgaccgcatacttcttgtcagtcttatttcatttggttgttattgtggtttggtttcatttcatgttgctttggagggtcaacctttctttcattcatgacattcaatcaacctttctccccagtgcgtcttcccattttttatgtgtgtgtcaggagatagaaaaataaacacaggtattaatgtgcctgtgggcaccagtttgtaaagcccaagacgttcttggacccaaggaaactttcagttctttctcagccttgccgttttgcatgtaaagcatttgagctgatctcagagttgaggtggctgccagcttccaccagaacaaaacacacagcagcaaaacagcgccatgtccctcagtgtgggaaccagggtctgcctggggcccccctgtaaaaacgagagatctgaaggaaaacagacagcatttgaaaggcggatgacatcaagaaagtaaaagcaactataaatatgacttctctcctgctttacactgagccttctgttcaagaaaacacatttaccagggattttttccttaagctcaactggaaaaacaaatatttagtcattttacaagagcagacaactgaaaagcaagccacagattaaacaagcattatgtatttctaagaaagttcatcaaacacaatatatctttgagaacacaatcttgaagtctgttttagaggcaaatttgaccttcaaaatgaattttgtctcgatataattacaaggtcaaatcttaaagaagcaaatgcatagacaaccatctttgcaatgagatctgttttatatttgcaaatgaacaatactggacagaaaaaaaatacataattacttctgaggttatatataaaatacccaattggcaattagctaatatcatattagcatctcaatattttagataaagcaaaactcccaagtacaaaataatctataatagaacaaaaatggcaagtcatattaaagagagattacatataagagactttattacaagttatcattttttagataaaatttattctttcagcatcactttgatacttgtaggaggcagatatagtatagagaggcagatagaggtgagaacctttcctaagaaaaatcaagcagcattaaaagcataaagaaaaaagaagaaaaaatatttcagattcccaattcgtatatcacattgttgacaaaaaaaaaattagagaataccaacaggaaaaggtttccttgtgctctttaagggtggggaatttcaaagaaccttgaactcatcatgaaaatagttctatacccatcggctttgccaaaaacactttgggatttcagtgatgggtactgagccaccaggagcaatgaaaccagcttttccatttccactgagttttgactggtttacaaggattgcacaaagatcacctcatttgtactggacacaattgggaaataaaaatttaaaaatcatccttcatatttaaaatagaaatcatgaaccccgccacaaacatgcttccccgacactcaggacctgaggttgacaacatgcctccccgttaacccatgaagcctcataggtatgcactgcatctatatagaattttccatggactccatcatcaaagcatcctttaacaagtatgaactgagcactcaccccatgcacagagctgtggacggggccatatgggacagaaaagttgcaaggtgtgtctctcactcccaaagagcccacatgccttgcaggagaggaaggctgtggacccaggttttgtgatgcagatgaaggggccacatagctgctccagtaagaagaactggaatcatctgaaggagaggaaaatagggcatttcagccttgaatagcagaacccagatcatgaaaaataggaagaacttatatggacgtcagagaggaaggcaatccagacaacaataataacttaggcaaaacagaaatcaaatgcagcttgcagaagactctgtacagggagccaacacagctactttacgtgaggagtcaatgagaccatttaatagaagccccctgtcgaaactgtaaaaatgattttgccatcttggccatctcctgagatggctgagaagggatttgccaagcaaaaaaagagttgaggggttttgcacaatggcctggaacagagaggctggagagaaatcagacaagtctctcaggcagaagttccagaaaaatgaagaagcaggagagcccgaggcaagagggaaatggcaggcacattggttggacgatgagggtttgtgtggatctcaaagggccaagacgtggggagagtctagacttttaggctaggaagtccgaaccttgttgtgaaaatagctgaagattttggagcacctgccgagcaaagtttcccaaagaggctgttgggaagattcatgaggcaggagactacagggagggaaggccagaggcagagaggccagttccaggatggctgccacgatccagcccaaggtaatgaaggtggggaagcctcggaatgcaagagacagggtggagatgagaagacatgtcagagcctggtggccaattaagcagagaaggtgcagggaagagaggagagcaggatggaaagccaggaaatgtgggtctcagtgaagatggggagttctgtttcagccccaagaatgagcatgtgcatccttgaaccccggggcctgtgaggttggtcaatggaagcccgggagctctgctcagtcagggtctaggactggtactcctgctggggccacctcagagcagaagcagggcgggagcggtggaggctggctctgaagtgttctgcccttaaagaacagcaagactttccagaggcagtgtgtagcctttaagatggagactgtgatgaagaatggagagagatggaaagagcttctcagtgacatggggagagggtccgcacctggagggcaaacccttcctggagggcagaacctcgctggccatctggcttcccacacacctgcctggtgaaccaacatatcactagggggttcttttcttgcttgaaatgtcattgagttttcaatttgtagcattcatgaggtgcattatgaggtttattcagcattttttttcttttgctgagaaaggcacaattaagtaccagaattttctttgctggcctagccttctggaatctgaacaggttttgcaatcccaggaccagatcctctctatataaaaattggtgtgggattggggggggggggtctctttttataatagctagaacatcttaatattttgtaaaaaataagctcatcacgaacccagttaacccagcaaggctactgcccttcttctgtgtcgtggtaacagctttcttcagcagtgcaaggtgcaggcagagcctttcatagttttaatcactaggtccatttattgagagagcttgaaaggtgattattcctgttctcatttctcagaaaactgaggcatgtgaagatcacaggtagggtaagcaaatgaacacaaattcaaactcggaattcaaaaccagcctctgtgtattcctgaggaccatactgtctgctaagtgtagagaaaggcacatcctggttcaacagcagagaaagcaaacaggaggcactttctgtgagtcatctccaccacagggccctctcttttgtgatccagcgatacttgttcacagtcaaagcccaggaagagtggaaagattaacctttgtgagccaaaccgtgtgacacttgattacttgacagaactaatccttctgtcctgatgacagaaattcaactacacaggtacatgcaagctaatatctgttgtaatgcctcccagtttctctggagaattccttagtttcctggacatctctgaaatgcaaagttttggcaacgagtctctgaattaacctctgaaaatctcacccagccaagatggccttcttgagaagactgaagaacatggttggtttcaggctgagctggaagtggtttacctcccaggagaggttccccacagtggtgtttaaggcatggggtggaccaacaccaggaagactcagacatcacaccacccaccttcaactcagtcacatccacctacattttctgaaaacaaaaggcagtctccccaaaaagcactgagactcttgtgtaggtaatctgagcagacaccaacttcccagggcttccttttatccaggagagcttggctgttctttttaatggtaatatcttcttcttcctgcagcaccgggctgtggcccactctggagaaaaggaaagatcattgctggcctgccttcccaatttcagacttgccagtctacaattgtgtaaactaattccttaaaatacatctcattatatctatcatccatctgaatctagatgcatacatatgtatatacacatatgtacacagttataaatatggatcaatataatgagatgtatttttaagaaattggtttatctgtctatatatatttacatacatatacatccatacatagatatctcattttatctctatatctatatacatataaacacacgtgtgtgtacatttatgtatggacataaagatgggtgtaataagatttattttaaggaacttgaaatatagagagatatctatatatatctacacacacacacacacacacacacacacgcacacagagaaagagagagagggagaaagatctatctacatccatcctgttggatctttctggagcaccctggctgacactcctgcattgatgagtcattggttgtaggatgtcctgggaacgaggcatgagcttggacagggctgtcatcatcagcaggcacttcccaaagagggctgacagctgaggcatcttccaaccatactcccagcatctgagggaataagtccttccttcctgaagggaacccagacagcacatcacagagcccacaccaactgggcaaattgaatgtgcacagagtaaattaccaaaactgccaataaaactcagaattataaaatcatataatttagaaattataaaatcatataatttagaaattacgtgatgtaattaacatttgcaatccgttgacttaaagtcgattatgtgggaaataactgagagttcgttaataagcacaaaacaatccagcagaaattgacagcattaggtgctcaggttgtgtggaggtcaatctcagcaaaccagagtcactgggctccctagatggagttaaggaaagccctgatcttggaccagccacgtcctttacacatagcaaggactgtaagcccgaccttgctctagcacaggaaggaggagggcttccctctaaaaaccacccattttctcccagaaccccaagactccagtccctgtcaggctgcagaggtgatttccaaccatctgatgccacctgcatcagaatcgctgaggcattcctgggccccatgccccattcctggagtcagcagccggactatgagactggctcagtgaaccccacagacagggtcacaggcatggaagcgcaggcagcagagtgcaggcacagaggctagcagtgaccatccacctggccctgaacaagtccaccttctcagagttttagtttcctaacctggaaaacagggaataatatcatgaaagaaacaccaggcacagcactaatgtatcacaaatgccacataagtaactgagtgcaaaatgggacatttcctgccatcggctgaggctcagaatagcacacagagcacagcagcggtgcactctctaaaaaaggatgcccgcacatccatgcacaactctctaaggagtgacctaaataacaacagcaagtccctgcccctctgccttcccggcctcaagggtatatatgtcagaaactggtcaatgctgagtatacagctcccacagtcgcagaggggagcagggtggatgtgtagagttttctggtttctgcacagtataaatcctcccacaatttcaatcaaccaaaggaggagttgggagacatctgcacaattagctcttgtgcaccggcactgatagaagagaccagagacctggcattccttcagagaaagtttcagaggctgtgcagcacctctctccaccccagggaaagaaaggaaagggggacataggcagggaaatttcacatccatgtgcagatgcaccaacctcaaggccagtgagggaagcttcaaaaaaaccatttaggctgcctccaagggttcccctagggttctgagctaccagggcacaggggctagtgactgccttccaggtagagaagtttgcagaggctgcctggggacaggtaagaaggagaggccatgggggggcacactgagcttccatccatggtgaggtgagagggcctgggtatatccttgtacccagggacccatggcaggtggctggacttgcaggggtgagccagccctgacagaaagaggctggaggtgtaccagggtgaagctaggggaagggtaccatcagcagacacacacagggatgtcaccctgccatggagagctgtggggcaatgtcactgcaagagcccttccgcaccctcccatgcattccatgaacaaggggcagcttttagacctttgcttcacagaggggaatccgacaccaaattatgatgcatggccaagtaaccccattaatagcccttgttgtcctgtcttcctgctccaaccctggagaaccagaggcagaggtcagtggtaaggagaggagtgggtgtgcaagcctctgaggctgggagccggccatggccccagaggcgtttccgatgctaacaccagctccggatgcaaagaatcttgaaacaggacgaacaataggcttttaaaaattcaacttccctggacctctcaatacttggaaattagactgttcactgtatctagaagtgacagggaaagtctggtgcctgaggagactcggaacagggacaggaaggagctatcagacttgaggcatgagtttggaggaagtaaagttgcacctacatcataacctactgagaacagctcattcagaaaacaaagaagcccagtttctcatatgttgggtgggtggccctgccaggtaaacctgtagcaaagccacatggaaataggatagtgtcaaaaccaatcaggccaagagtgagcaacagcccactgggtctctgaaagagctgaggaaacaagaggaggcaaaagaagtgatctataaggcacgaggttggtgacagggccaggaagtttacaagagcgagcatatcagatagacaaacaccaagaggcagaagagtctacagatacaaggagatccaaacctacccgcaatccccacccaaccccgccccggctttggctaccctggggctggcgaaggtattaagtgaaaacacccaggtttgagaatggctgggcatcaaggcagttttgacaacctcagaatcaggaagtatttgcctgcaggccagtagctgggagaaatgtccagctctacgtagatttctgtagctggggtcccattttccttcaaggtgggatgggtaagacagaaaacgtcccctgaaggacaagactcaggacagctccagcctagtgtctcccggtccctgtttgctccacaggagaaagaccctccagagtgcaatgaaggggcccagaggggacagtaaagggaccccatcccatgtggcgactcccatcatggcagaactgtagaatccaacatcacatggacctcattgataacactgaccacacctccttgctcttaagatggataaagggcagggacaaggggctccgttttatttgaccaatagctgcaaaagtaagaaatcgtaataagcatggaatcacagaaccagttgaatgtagaattaaacaattaaggcacatttctggcttaaagatgccaagaggtttttgtttgtattctttatgttttttttggacaaccactaaacacacattcagagcatcttctataagagccacagagacatcccttgagacttcagatgatttcaaaactctgctatcgctccttgaaaaaggcaagcctgggattgcaacctatccatgcatctaaccccccctggaaatctctggctccaagagtctaatggtgatggctgccactattagatttcctttctctctgggcattacaatcaggtttacaaggaagaaacaccacccagggttatcacctccaccagtggacacagagttcaccagcttttattgccgggactgacagatgtcaaggggatcactggattccaggattgacaggatggaacggtcagtaggacgccttcccccaacaactcagatgacagagtccacaacgcggcagccagatcaggcaggaatcccacctaatgtctgaataacaccactgataggaatccccactgaatcccaactgaaggctcagttgtacactgtgggcccaaaatacctacaacgttttacaaaacctaaagaaaaggcagatctctttggtggcaaaggcaatgtggtgagttaactttgaagcaatccaacaccatattattgtcatagacatgctcactaagaaaaaaaaaatcatacagagaaatagaaaaatagagagataaatgaataaatatttattttgaggtttcactgccaaaggctagccagagaaacaggggagatacaaggtgaagattggaatcacaactaaatattgttcctgtataaggagaattttccctgtttgaattcttagattacttgactccccgagtttctcattcctttgacaggcacccatgagtgttacactccaagcactcaccctcctatttccatgtgccagcatttccagtcactatcttgatttaagtagagaggataacagttttctcctacatagtaactttaaaatagtaacagttttctcctagaagcaacttaaaataaatttattgacattaaaaaattttaaatgaggtgtagtcaaagcttaaccagcacttttttaaaggagcatattttactttatttttatttttatttttattttgagatggtgtctccctctgttgcccaggctggagtgcagtggtgtgatctcagctcactgcaacctccacctcccagattcaagcaatccttaaagaagcatatttcataaagaacacttctgagtcacttctgttgtcttcctgagtgctttttacctgctctttgcatgtggcataaactcctgcttctctaatgcatctcagtttttaacttttggctctttcactgcaaacataggaatttttaaaataaagaaaccacagccaggcatggtggctcacgcctgtaatcccagcactttgggaggctgtggcaggtggatcacgaggtcagcagatcaagatcatcctggctaacatggtgaaaccccgtctctactaaaaatacaaaaaaattagctgggcatggcgatgggtgcctgtagtcccagctactaaggaggctgagacagaagaatcccttgaacctgggaggcagaggttgcagtgagccaagattgtgccactgcactccagcctgggtgacagagcgggactctgtctcaaaaataaataaatacataaataaataagtaaaccaaaacagttgtacaaacaccagatattcaaacatcaaatgacttgataaatgtggactttaacggggcaggggataaggaagggaaatgcagcaactggtgcatttacagcaattaatcctccctcatcattaaaaaacactgctccattttgtaaatagcagcacagagcaaccacactggagaagtcatgcttaacaatacattcatttgtgggctttgtgatttttttccctctcaagccattttgaagaaaatctttgaacacgtctcagtggcttgatgcttcacattaagctcctttaagcagctagaagtttcctgaaggaaacacatgagccttttactcctagaacgccaagagctggtggagtcctcaagaaaaaaacgacgattccagtgggaatgaatttccttctgagaagtgaagggcaaaccacattgaaaaagttgagcttcatgcctcaactcagaaagttaacctagccagggtccaggcaagaacaaaatctgccagaaaggcagggtgagctcagacagatttcaagcaggagcacaggcaaggtaatgttcaaaatcctgtccagcccccaggtactatgaatactcaatgacatcaaatggagccagttccaaattgctaaacttgtagctcatagctgggtctcctcaagaacttgtctttagacccctaaagacacctctgccacatgaagagacccgaaacgcagcttacatccagagcaagtcctttgttaatgaaaatgtgaatggcaaagacatcaaggtctctagcagtggccatatttgaacatgttttaggactttcagataaaatccgattaaaacaaacagattggggccaggcacggtggctcacgcctgtaatcccagcattttgggaggccgaggtgggcagatcacaaggtcaagagatcgagaccatcctggtcaacatggtgaaaccctgtctctactaaaaatacaaaaattagctaggcgtggtggtgcgcaccctgtagtcattctttgcagttccttgctctggggctgcatgaaggacttccacctgtgaaaagaagtggcgaatctggggcccatcattggaaatgccagccttctcactgagtctgctattttgcaagaaaaatcaccaacagcattccccttaagtaagtctctcgagatatcacccaaggcagggaatccccaactttgctcttggatcaagaagggcccccgataaggttttcaatcatccttagaaaaataggaggaaagcggaagaacagtactcttaggcgaaattaacataactgaagtcacattcttttgaaactatgtcctcagatttttgggggtggaggttaaagtgtcctttatttgctgaaatgctgatgaaattagagaatagaggttttcctcctttgttaatgccttcacgtattggcatcttgatttcctccttttaaaaaatgtactagttttggccgggcgcggtggctcacgcctgtaatcccagcccttcagggggccgaggcgggcggatcatgaggtcaggagttcgagaccatcctggctaacacggtgaaaccccgtctctactaaaaataaaaaaaaaaaaattagctgggcatggtagcgggcgcctgtggttcccagctattcgggaggctgaggcaggagaatggcgtgaacccgggaggcggagcttgcagtgagccgagatcgcaccactgcactccagcctgggcgacagagcgagactccgtcaaaaaaaaaaaaaaaaaagtactagttttatgtcttaatagcaaatctccattctaaaatgtctacaaaattatgagaattttattatatacatgaaaacatctattatggaataaataggagaaaatgtaaaatattatgtacagtatgattacaataagaaaaaataatacacaaatgtaaaatgaagatagttacacaagggtggtataattgaggcaattttgagtttttaaataattgtttaatgtccttaaagcattactttttaattaaaagaaatttcatgtgaatgttattataacagatttataatagactttttaaattacctaccaaagcataaacatttatctctacagatattacagtatgcctttccaaaaatagtcaaataaatgttagctcttctattaccagtataatgtgtacattgttagtattactgattgtgtcctgtctaagtacgaactcaactggcatatccacattaggtcctgaagaatggcctcagccttactcaaggaccgttctctgataatgtcagcttgaatagaagcaacttaaaaatctccatgcaatttctattagcctcactcatgctgctgcaagatctacaagccatttgctcttgttgggagtgtgaaatgttaaccagaaagtgtacttattatagggcgtattatttcttttcttgcttgcttctttctaactgaagattctgctctcgttccccttaaaacaatcttcagtgtttcctagatgaaatatttttctccatctgtcctctcttccagcttccacacagttgtagacttactctcttgctgaattttcagtttttcctaccaaaataccggctatttttgttctctccttccccacttctgtccactttttaaaccatcaaaaagctatctatactaccccaaatgctttcaacaccaataatacaaaattatattaaaaatgtgatcttggagtggcacagtaaccattgtcacggggtcacaaaaatcactgtttttaaaaaatggtttccctcactgaatgcccatgctgttcctggacttcactagaagtacaataaataatcttcataaagaacagtctgaaatcaccacatggtagactcgcctgagacaatcaggccttattccaattacaagcacgttgaaatgctagagaaaatctaaccaccaccaacatccaccctgcccccaagaaagaatttacatacattacacacatggccaagaacaagagaaagaaaacagaaagccccaaggtccagagtcaaagaaagaaattcagttagcaagtgctagctgaatccacaggaacccatagggatttgggtcacaagtgcaagtcctaagcactgcgggtggggttccaaggcccaagcagggacaaaggacacagcttatgacccaagagaagcaggagagcaaagactggaacctttcctagcaaaagtagctgtgtgcctaaggctacgtgcagcaaaaacagtcatctgtgagaaataaaaaccacatttctgttacttgtatggtgtgttgcagcccagatagatgatagatagatgatagaaagatagatagataatagctagatagataaatgatagatagataatagataaataatagatagatagataggagataggtacgtaggtaaataggtagatgattgatagaagtaggtaggtagataggtaggtaggtactagatacatagatgattgataagtaggtcattagacagatgattgatagatgataaatgataaatgattgataaatgatagagagagagatgatagctaggtagataaatgattgatagaagataggtagataggtagatagatagataaatgattgatggaagacaggaaagtaggtaggtaagtagactgatgactgatagatagtagataggtagatagatgatacacagaagataggcagatagataattgatagaagataggtaggtagataggtgactgatagatgattagatgtatagatagatggttgatagaaagatgatagacagatagatagataaactgattcatgaccaactgattcaacacccctagggctctggcagaagcaaaaataaaactactttatagagacactttcatagcttacattatagagaattcacaaagaaagaacaatcctcactgaagataagctcacaagaaaattttgtaaagtacatgaagaaaaaaaccaaaataagtagattttagtagatgtagtagatacaaaaagattgaggattagcaccccaaacagcatggataaaagatcaaacaaaagcatctataaagttaatttaaaatgactttttaaaaacagaaatttaaaccataataaaaagcagcagagtataaatcaataacagacagagctgaaataactgaagacaaattccagaaataaaaatttaatagactatcttaaaattagttattcaaaaatggtaagagaaattactgaactacctagaaagaaggaaaaacagagatgttaaggagtgtggaggctagcatgagatgtccaagtgaacagtgaaaatgagggataaaaattattcagaagatatatttggagataaataataaccagattttagagaaagaaatgagacttcagatttttttttaaaaaaggagtcctgagcaaaataaacataattaaatccacatctagtcatatcatgataaaacatcaaagacaaagacaaagtattaaaagtgaccagagaatagaataaagattatctacaaaggaaacaacctgatggatacaagatttctcatcagcaacaacagacgccagaagggaataaaataatgccttcaaagtgctgctggaaaataactggcaacctaaaattctacgtcaggcaaaactaacattcaagagtgagtataaattgaagaaatgttgagggaaagaccaaaagattttactacttacagacacttaattaaagagctattagagtatatcttcaataagaagaaaattaaacccagaaaggaaaaaaatgaaattcaaaatacaaaggtaaacaggctgggcgtggtggctcacgcctgtaatcccagcgcctcctgaggcagtcggatcatgaggtcagaagatcgagaccatcctggccaacatggtgaaaccccgtctctactaaaaatacaaaaaattagccgggcatggtggcgggcacctgtagtcccagctactcctgagaggctgaggcaggagaatggcatgaacccgggaggctgagcttgcagtgagcccagattgcgctgcaccactgcactccagcctgggcgacagagccagactccgtctcaaaaaaaaaatacaaaggtaaacaaagacaattatgagtggatatatatgcatcttaaattcaattttaaaagaaaattatgagttgataaatcaagataagcattgatacaattaaagagataatagtaatgattaactttagaaatcattactaaaacaaagcagaactaaagaactaggtaacagtaacctgagagctggaagtaggggagcagagtcagagggccttggatcgtttggaaagtgggtagaaacaatgcttgatgtcagactttgttaggtgagggataattagacaatcgtaagaagagtctaaccagactaaaattagagtgtataacattcccaaaacaggagattgggataggcagcataaataaatttgataaagtcaggaaaaatgaaagtcacaaaataagttgacagtaacaactacaaatatattttgtatatattgtaatttacacaatatataaattaatctcacttgtcaaaacataaatattctcagcctggatgatttttaaaaatccagttatactctgtttatgagagatgtatctaaaccataaataaacagaaaagtttaacatacatttactgaaaaagatatacctgatataacataccaaaaaagaagttcagctatcaacaaaaagaaagctggaatagccactttactatcaggacaagttagactttaggataaaattatttattagggataaagatgagcaaagcttggtaataaggagcaataattcatcaagaagatataaaactccagaagctgtgggcaccaaacaacacagcctcaaaatacatatgcaaaaatcaacagaattataaacagaaatagaaaatccttcattatagagagaggttgtcgctctcacctaaacagctagattaagtagacaagcaattagtacaatgattctcagaggatgctttgtgagacttcacctgttgcctgacatttagtggccaggacctaaagctgagggtttggaggtgtctgggaccccacattctgaattgtctgaaagaaaagtcagacaatttctttcaccctctatgcaccccacatacaggggcaccagaaccagtggggtgggagcaaaggggtgggtacaaacaatggaacagacctcaccctccagattcccacagcccatcccccatgtcttgggaggcggtttagggaggaagaagggtagaatcacgtaagatcttccatgggttttaaaattgcatatatttattgaaagtatacaacaggatgttttgaaatactcatctggatatacatagacacagcacaatgattactacacagtgatactacagtcaaacagattaacatacccatcatctcccattgtcagtgtctttcttggggacaaggggatggtaaaagaacctacaatccatgtaagagattttattagaccagatcagacttttaagtgattaaaggagactggaaagctcttgaatctactccagacagtaacaagggatgtaaaagagagatctgtccaaacgtggatgaaggcaaaggggaagaaaatttgctgaatgcaccacttatacaaagatctgaaaacacaacaatccagctagatctagcaggcattaagggaacctgaaccaaactgaaaatacatactattttcacgcccatgtggaagatttctaaaaacgacatagtaaatcccaaagaaagtatccacaaatttcaaagaatgaagatccacacaacacgctccctcaccacaataactcgacactggaaaaaaacaaaggtatctcaaaaaaaaagacttaaacttaaaaaaataaaaacaattatgaggcaatcaaagaaaattatgaaagaactaaaccaccacaaaaatcagtacgtgaactcaatctacttgtattcatatggataatctcaacaacataaccttgaatgaaaaaaccacttgcaaaaggatatgtatagaataacaccatatgtgcaaaattataaacacatttatagaatacacatgtgtgcaggtgcacatgcatatgtgtgaaatctgtgctgtatacaggcaaagagaaagcagagtcacgtgaacaggaagaaaacacacccatttctggataccaaatggaagaggaagagactgggcaagaaaaggatcaaatgaatcatgcactctgtttgtaagctgtgtttcttcaaaaagactcagaagacaatacaaccaagcattagcgtgtgttgaatttggtcaaaggcgtttttcgttttattatgactggacttttgtatatttcaaataaatagaattaaaggagaaaagttacttaaatgctccaagccatttttaacacggcttctgctcctctgagcacctggctggtgcctttagagtggcgagagatgagaggccacaagggaaggatggagggagattcaggttcacaggttctttgcaatttaacatagcaacgctgcgatcactattcaaacacacagcaagtaatggatggcacttaatatgcacttcggtttcttccactgcccttgtgcaaagtaaggcttcccagaaaacaataagaactaaaatgttttcctgaaacaatgctagattcctaaaagcaatacccaagcttgagccataatgggttcaagggtggtggatgaaacacatcttcaaggttactgttagttcactgccatgcgggcttctatgcaaacggcaacattcaccatccaagaaagtaaagagcccagactcagtctccctcttccacagatcaactgggcccaaatccatccacttctctgcattcagctctttcattagtaaacctgatactagtagtccacgtgcgcgcacgcgcgtgtgtgtgtgtgtgtgtgtgtgtttagcaagaggggcttgaattcctcaaagtctcaatgaaaactcagtgtagactgaagcaggggagattgaactgcaattgtaccagtgcttaaagacaatgaatgtttgatctgagcaatcattctgtgctgtggtgtgagaaaggaaacctacggagtaatacccctccttcctgtgaccacatgggctggactgtgcatcttggccacctctaatgcaatgcaacaccaacccacgctgtgtctctctctgtccttggcgaggtcctacacacaatgcaaggaactgcttcaccgcactggccaaggacaacaagaataggcttgaggggagattgaaaaagaggaagaaagtgtttcacacagaggagaaaagaagttttagattaaaagagccctcatcacttcccatgtgctctcaccataactgccttggagggaagcaatccctgctatccacaaaccagcaggactggcagaaggtggaacacagaggtaatcccttccaggggctcagacccaacacaagggcttcacccttggctcacttcttctcctcgtgccacgcatccaaaccctatgcagaataacacgcatgccctcatcaccgcccacctccccacctccactgcaacgtccctggtccaggccactgtcacccctcaactggattattatgttagcttcccatgttccctgcttcaaaccttgaaactactgtccacaaggcaaccagcaagatctcccgaaaacatccatcagatcacatcactcccgctgctcacaacccgccaatgctgggcttcccatcacacagacccacggcccttagggaacctggcagcaccccttcatcacgtggcccctctttctgtgacctcatctccactcctcccctctctccatctggccgccctgacctccctgctgctcctcaagctcagaaggcaactggcaaggcaactggctgttccatgtgtctggaatgttcttccccagatagctcccggctcccccttcgcctcccacaggccctcactccagtgtcagtctttccatgactgtcactctataaaatcctaacccccaacactctccatttgctgcctctgcctcatttttctctccttagcatttatttccaccacagcaggcctttgctcatttgtcttattgtctgtctgtctcctgcctgaggatggggacattcatctgtttggctccccgctgcatcctcggcacccaggacaggggtgggcacggagtgggcaggcaataggtgtttgttaatggaattctaaaagtaaatgacaaaagagaagggaggtgaaggcagatctttgttttctggtttataaacttagtgctgggcaggaggaaaaaaagcggggggttcatgtgaagctcctttcctgagtcaacatggtgatttaaaataaactaaatttagttggagaccttttaaatcatttttctcaagtcagttatatgtgctctagctcataaataggaggaagaatgcgggtgacattcccaagactgcagcaaatgtcggccaagtgaaaaacacacagaatgtcctgaagatccagcgacgtcctgaatgtgacgcgttccagttcacaaaagaggagtcacaaaatgtttacaaacctttaccatcccattgaaatggaccttcacattttcctcaaaaatagctttctaaaactgttactggtttacattaattttacctttcttctttttttcccctttttctttcttattttagaaataaagtaataggattagctttttgattaaagcatattaataaaattttgacattttatttgatttcaaaacatgttccagtttccatcattatagtgggtcctgtatgccatgtttatgttttgaaaggctgaaattatgtgtgatcaacaaatttattttatatcaagagcatctgtacatattaaatcctaaatgtgtcttgaaaaataccccctcacctttctctatcctgcattttatctgaagcattgtaagtcttcatgaaaaacagaggaaaaaatgaaacacagtaactaactaggaaccattagaattattttctttgacatttcctttttttttttttttttggagacagagtctcgctctgtcacgcaggctggagtgcagtggtgcaatctcggctcactgcaacctccgcctcctgggttcaggcgattctcctgcctcagcctcccaagtagctgggactacaggcgcctgccaccatgcctggctaattttgtatttttagtagagatggggtttcaccgtgttagccagaatggtctcgatctcctgacctcgtgatccacccaccttggcctcccaaagtgctgggattacaggcacaagccaccatgcccggccctttctttgacatttctaagcagtagatatttgcaaaccatgttaacgatctgtagatgtatattactaacaggcggggcccattgaaatcctaactcttctccatttgtttgctgattcttatcagtttaaataaaatgttcactcttaaactacattttaagcaccgcataggaagaaggtgttcatctgaggaagcagtgaacggacatcataaacttagtcaagactgtttagtaaaatcacaaatagaccaagcagtttcactgctgtgagtttaaaaaaagaaatcactgatctttagtcagacatagttttctgaacgaaagttagcacacgcggcccctttccagtctacagttgacatgtgtcttctaagtgactagactatgaaacctctaacactctcatcagagttaattcagagctagtcactaaagcacgccccctgaccacatcgtaactactgtgaaaagcagtccttatagaaatcatgacgttcttttcctttgtttgcagtaggttgttcatcgttttcatgagaacataagggccctctcccaaatagctcagtccccaaaatgcagacatcagcaaatgacagcaggtaacgcctgcagactggtgctcgccgctcactgtgaaggcaagcaggcttctgcctcagttttttccccctttctcctctgatccattccaatcaacaccactgacagtggacagactgctgtccgggtaagagtgagggggacagagggcctgaagttgctccattcgtcctcatcacgatgggtaaagaagggacttcatgtccatgtgcagttagcttccaaaagacaaggaaatctcccacctagaaggggacccccccaataccaaccacaggctgggccccccctcttcagccggcccctgcccaggtcctgctgaccaagcctcctcaggacacaaggtcagttcaggacttcagtggcctcatcccttgcatcccaccttctgagttaaagtctttcagaaatacagcaccatgggcttctagagctgcatggaaccctggagatcatcccactccactcgttgaacagtgggggaagccaaggttcagcaaacgggattcttccctcaggcttcatatgcaatggaagggcaccagctaaaagctaagcgctttgactcagagccaaagaccagggacctttctagcaccttcctcctacatataacttatatgtaggagaaacagttgtttccatgagcccatagaagaaatgtgatgtcaaagtatgggagaacgttggatagcattaatgtctagtcaatacacattctccccttgttcttacaatgaatcccaatgttgttcagggccacaatatcttcaggtacaaattacattcccaggcttccttataagatgtggccatgagagggagttgtggcctaggagatgtatgtagacatctactctgggtttctgggaaatcctgccctgctcttcctcttagggacaccctcctacctcttccatccttgggaccacgcagatgaaaccacctgcaaagttggcaggcagtggctagaaggcgactgggatggatgaatggcttccttgagcagccaccctgggaccatgcagatgaaactacctgcaaaggtggcaggcagtggctagaaggggactgggttggggacgaacggcttccttgagccctggactggtccatgattgctcaagtccaggtctctccttaggcaagacaaacacacatgtggggaggaaggccaatttatctgatcggtgagttgggaagaaaagacacagcatggtcagcgtggcctcagcagggagtccctcctttggggaaatatcctgtcccaaggccaaggtattattctggttggccattggatgagattcctgggacaggctctccctctgggggaagcccaagattgtccggctctactcagcacaaatgtgtaagtgtgtatcagaggtgaagtatcagaagtcttaggtatttaattattattaaggcaaagattacatcactgcctgagatacccaaatcccatcccaagcaatttcctaacaactgatctcataataataacaatcttattatgaaaaggccagtgcaaattgattcttagagacactattattcagtacaacaagaatcagaaagtcaccataaaaccatggatgtccagttaattcctcaccttactaaagcaaataaactgcctttagaattaaactggcaataccagtgctgccctcaaaactcactgctgcctcaccaatagataaaatgtcacatgagatgatataaaataaatggggagatgcggaattacctcactgaataaaatggttatctgaacaaaatgtcatgtgaactgacttgtcatggagcctaaaatttcttgagtcccattcccttaggtgaaggtgggaaggcatctcaaaaaatgcaagcatggggctttgaaaaagtcttcaagtaaaggaggcagtaaagcaaaaagggtagaatcatgagctttcttcagttcagagttagttctggttctggctctgacatgtactagttttgtgacctttttctaattagtagacaccatctcagaggtagctataaagattttgagatgaagtctgtaaagcatctagtatgtagaagcatagaataaatgatagctgacaattattagagtgattattatttagagtgtctggcagtggtgtgctgacaaaagggtttttgaaaaatcatttgtttggggaggaagccctggtttgtactgactgccaatttccatggtgtgaacacttccattacagtcaacttcaagctaccaatgggatgtcactgaatgcagagttgagaagagatgcatacagtcagctctcaggagctgccaagagtcagcaacagcttctctctggttcaggcactgtagtcacacctattgacatggtttggttctgtgtccccacccaaatctcatctcaatttgtaatccccacgtgtcaagggagggacctgtaaaccccacgtgtcaagaaagggaggtgattagatcatgggggcagttcccccatgctgttctcatgatagtaagttctcatgagatcagatgattttatatgtttgacagttcctccttcacacactctcctctctcctgccgccttgtgaagaaggtgcctgcttccccttccaccatgattgtaagtttcctgaggcctccccagccatgcatagctgtgagtcaattaaacctctttcctttataaattacacagtcttgggtatttctttataggagcatgagaatggactaatatacccgtcttgatcattgggattcctctgtgtacggcaaagcacctagtgaatgaatgatttatgaatgatgggttattattaacacacaaagctatttttgtctcaataattttgcatacctttgaactgagactcagaaaaaaatgttttcatgaataagaatagataagagggacattagagcatggactgttgcttatacttgaccatgaacaccgagacagtgccttcccaacacctagcactattccaggtataagatatatggcctgtaaatgacttctggtttggactggactggactgaactggactggactggattggattggattggacaaggatgcagaaagaaactgaccataagtctgctcagaaaacattcaacctctaagagggagggaagtctaccctcccccacctcatttttatcctaagcactgcctggaggaaatgccctccaagtcccatggtggaaaccatctaagatgccccttcgtccatggggcttgctctttattttaaatacagttcagttttgattgctgaaattttcttggagccaagggattccaacaatgctactactcagaacatcaagaaattccctggagattcccaaagtaaataatgtgatataactcttacctacaattaatctatgcatgaaaatatattgagggatatgacatcttctaaaattacctgcctgaatttctagcagagagacctagggagttacatcatatgctgcctctccaaacccaacctctgaatgacctccacgaagggataacataataatgcggctgtgtcttggtaaatgtcatttattccctcatgaattttgacagagatgacatcaagtttcttccaattctaagatttgatggcaccataaatatgacttcaatttttaacaatttaatgaaaaaatccttctggaaagagctgctcatggggaaacacacctcaggcatgaggcacattttcttttccagcccttcctccaaccataacagatccaaaatggacttccaggaggatcctgaaatgagcccatgtgttcagcctctcccttaaccacatggaaagggcaggcggatgacctgcccaaggttgggaattcttcacacactaaagtccatcactgacatttaggagaacattttgtttaataaatgcaaaatgttctttaaaattatatccatgctttcattgtcaagggtcttaatggatgtgtttaaagcataaataaatatagtaggcattctgcttgcttaacctttcttcctcaccccttcatctcttcatataacattcactgaacataaaacaggacaagtcctgaactcatttctattccaagtactaactcaagtcactggaaaggtttctatttcatttagatggtacagagatgtcctgctgtttctgtaccatccccatcccattgttgatatttgatatgtcatgttcatatctgttgtctttgtttcccaaagggtttgtttagagtccactgctgaagaagaactaaatggaatctgtctctgggcaggaaggtagggaaggcctttgttttcccccacagtggcaccgacccagacaacagatgacagaaggaagagaccacaggcaggacaaggccagcctggagcagcacctggcaggacgaggcttaaaagaatgaataaggggtaggcccaagcccacacgtgtcatggagtaccatttacaactttgcccacttgacaatgggaatggggagagcagagccttccagaccatcaacagtaggatcagaaagtagaagagtctggaaaagcaagactaagccagaataatctggaagaatgcagccccagtgagaagttgacagccaagcaaggagcaagaccatcctgttaagaggcactgagtggtgaaaacagccttgtcatgaaacagggcagatgatcatctcggaacgaacaggtgcattcaggaaagataaaaatgaaaacaggaagatcaggatcattaaccggtaaaacaatgcatgcccctaaaataacaactgacaaggataaagtggcacagagtgagaatcacaaagtaacgtggagcagattgactctaatagaccttttctggccccaaaagcaaaaggtttggttggtgacatcttaagacaccttaactataaggtccctaagtggacaagagcaggcaagctctctcatttggcggggaggttgggggggaacaactttaaaacagaacttaacaaaatggctaatactaactccttgagaataggattcttctagagaaaggcaatggtttgtaggtaatgtagccattctgtcaatagcatcagcaacagcactgcctcctttacaacacagacctctcagcatcaccctctgtggggcaggagacagagtgagcagaggttagtcacatccatgtgggttctagctcccctctaccactcactagcagtgtgacattgctcaagtgacaactttgtgcctctgtttcatcaactatcaaatgagaataaaattagacttacccaccagggttgctaggaaaactaagcgttaaagggcagaacccaatcctgaaaatttagcaagtactcaataagtcaaagttagtccctggataaggacctgaaacatgaagtagatgcaattcaaccagggtcatgcaaagccgggttcagtgggaagaccactgagtctgtcagacacctcacattaagccaacagtcattgtgacctaccaccatccacttccctgacttctccaagatggtgtcaatgacacactctacctgtagaccgacttccttccccatgctccagccagtccagatactaagctgaatgtacttcagagcttcagcttcataagtcaatggagtctagaattacagcccacacacctggtatccagagagccagagaagagccttgggcacatatttctccaagacatgggatgtgtttctctgagacatttcctcatcctcctcctctctattcctcttgctccctcccctcatcctcctcctctctattcctcttactccctcccctgtctcttccctcctgctcccccatttaatctcactgtgatcctagcctgcttcactctctggccttgcagctaattaaaactgtggcccttagtcatttatttaaagaccccaaaaaaatggcacaggagatctagcaatcataaaagcatcacttttctgagattctaacagggatagctcaggaggccctacacaatgtattggtgaatctattctatttcagcctaccttgcctgacactgtttatagggccagaatttattaccagccttacggcttcataaattagctagtcagctattgccacacctcagtatactgtcacatctgtgaatttatggcattgtggcttaatgtagcatcattgtcatcactttccagtacctggagcattcattttatcctggaagataattcgtcatggttattatgagaataccaacataaacaaaagaggaagaaaacatgtaggttatggtctaattgcctgaatcaatcccagaagaaaagaagatacttgacaaagtctgcagtctttgaatgaatcttgaatgtgcttagtattattcagactcgaaatgctttgcacacttgaatgggaaagtatgcagtgaaaatcccattgaaacgccacagaacgccagccaagctaaagtgctgcacttggttggaatatctgggctctgactcctccgtaaatcaacatttaaagtgttagatacagagagtccataaatcattattgcatttcttcagcataagctagtgccttcagcaagtgtcttctgctgtttggctctttgttctgatctggtttgatatggctggtgtgggtttggtttggttcgtttgtggggatgaagaggttatgcaacagaaaggcgatgacttattcttttgctcttgctcacatctcccaggacgtaaaaacaatgccaattcaaccctcctactcatgtatgacggccaaacctgacttctggcttctaactgcaaaatccccagcacactctgcaggcccgcagccagctcgtctgcttaggaaggagcaatagtgtaatttgaacatgaccaataaaaaagaacaatggtcttacttacttttacaggttacattgtctcacaggtaaggaatggaatttttaatacatttaaaaatagagattcctaaccaataaaatatccccatcaccaagattttaaggatgccatgagtagctggtattatcaatgacatttgtgtagtgggaaaagcatggattttggagaaagaaagatgcaggcctaaacgtggactctatcattcactattgcccaaggacaggctttctctccaccaggctaaatcaagtttcccagtacacaagtgtggtggggagcagagtggttccgcagcagcaggctggtaaatttagtcctaaaacaagacaggtctaaaaatcttggaaagtagaatctgtttggaagctccttctagacattctgtcaagcacagccttgttcagtaagaaggaccttagacatactttactcatggcttcccagaaaaaaagtgaaggatgatgccatcagttttcagcatttattgagagaactcgaactactggaggatttcaaagatgcttattgggtatccaagtaagacgtcaagtaaaattttggatacaggaatttgagtgtgaagggaagcccaggaatgcaactatctgggagtcatcggtgtaggtgggattggaagccatgggatgggatgagatcacttaggaagcaacagactacccccttctgtgataaataaattccagcagattagtgtagattattgtccccaactcttatgtcctacctcctttcatgcagctccacatgtcatcttgtgacttgtgcttgcctggcagtagagagcgcactttcctctccaggaaccttgggcttggccaggtgtcttgctttgaccagtaaaagtgagcaaaagtgaaagtgtgtccgttccaggtggcaacttgaagaggaatcatgcatttctgcttgccccttgccatctccccgctgccatgagagcagcatgcctcagagagctgctgtcccttcaacctgggacccagaataaaagacacagggacctccattaggcccagctgagtccgacagagctccagggacctgaagtcctctgagtgacaaacaagtggttgctgttacaaattactgagacttttggaggccatcatttgctactgcagcaaaagctgactaatacaaaaataaaacccatctcttctggcagatccccccagaaaggagggttagtctccctcatagatatcaggccaccaagcctaagagagttccagatggctatgcaagttcagcccaaggcaatatacaaaaatgctccgagtttaccactggaatttccagagtctacttagatgctcccctgagtccccactcatgcctttccagcaatgaaaacctgctccgaagaaaaaatggctgacatcgagatgactctgagtacacaaggtgcgaagttacaggagacagaggctctctcggatctccaggtaaacacacgcagctgctcaggaaggcagcctgatccaggagcctgcaggagcctgagtcctacccagatggtcaggtgcagccccagctgtcccaggacatgcacgggaggaaaggtgaccacgtgctgtcagatagcagctcaggcaccactgtgcagtgcacaaccacacaggccttcattcagcaggggactagatttgtactctttttagccaaatgtgggccttctcatgctccacgtgtaaacgtaactcaccaaacagggcccctgctgctttccgggccaagtcagtggagaggactgaaggccggctcacagctaggaaagcagggctctgccgcgccgagggaatgggtcccaggtctctttcaacatcagtaggtaacacacacactcacagcacacaccacacaccacacacactacatgctcatacatatcacacacacacacacaccccccacacatgacatacacaccacaccatacacatacatgccacacacacatgctcatacataccacacacaccacacacacaccacacatcacatacacaccataccacgcacatacacaccacgcacacatgctcatatgtaccacacacaccacacacaatcacacacacacgtcacatacacaccatatcacacacatacacatcacacgtcacatacacaccacacattacatacacaccataccacacacatacacaccacacacaccacatgctcataaataccacaccacacacaccacatgctcatacataccacacacaccacacacacatcacatacacaccataccacaaacacacacaatcacatatacaccacacatacacaccatgtgctcatacattccacacacccacaccacacatactacatgatcatatataccacacacaccatacatacaccacatgctcagccataccacaccacacacacacacacacacacacatcagcacacacacacgtcacacacattttacatacacaccacacacacacaaagcatgcacacaccacacacaccacatacacacaagaccacacacacacatcatacataaaccccacatacacaccacacacattatatatgcaccatacactcacacgcacatcatgcacacacaccacacacatcacatatacatgccacacacacacacattacatacacactaaatacacaccacatgctcataaataacacacatcacacacacacagacaccatgcatacacaccacagagcacacacataacccacacacatcacatactcaacactccacccacacaccacacaccacatacgcaccacacacacacacacacacacactgcacacacaatacacatacacataaaatttgcatgaaataaacataaaggaaatgaacaccaagattcatctctcttgccctgcatattggattgaaacatggagcagactggccaaatttaagatttttataatttacctctgaaatcttcatcaaattcaaaacacaatttcactttttgccccatccggcagtgttgggggttttgccactggaataacacagtatattttccagtcacaccgtacatcagagctcatgtgtgtgttagtttgttgcaggcgtcctggtagcagagcgtgaggtcctagactcagagtgagttcctccctccagaaatgaaacacctaagttgctcagcactgacagcaaacatgtaagtaaggcaaaggttgccaccagcccagcaggggtcgaacttaaaatgaatctgtgcatgtgggccccttgcctttgacccatggggagcatcattccataaataaacaaggcaatacctaacagccattagatttcttcaaggccatctctgcaatttctttgatgaaacaaaattgaagttcataatttcctcccaagctaatgttttacaataatttttttaaagatcccagagttacagtaatcacatatcaaataagaacattcctgagatgttttccatttggaatagtgaaattatttattaaagcatctcggccttcatccttcaggctatatgtgaagccttcaagaaaacctcctcgtgagcctaaccacatgacttggcagcccccactcctactttctagatcatccctggccatgctccaccacccatcccatgatccagcctcggcaaagccctggctgtctccacattacaccaagcacctggctgcatgctctggcatacgccacttaaactctcctccctgggaacatcacatactggggcctgtcgggggtgggtgggggacaaggggagggagagcattaggacaaatacctaatgcatgcagggcttaaaaccgagatgacggggtgataggtacagcaaaccaccatggcacatgtatacctatgtaacaaacctgcacattctgcacatgcatcccagaacttaaagtaaaacaaaaaataaaaaaactctcctccctactcatcccggcgaactcctgcctgccccttagacacagttcatgcaccagctctgctgggagacaccccttctgtggtctccatagagctcctgtccacctccgttcacagcgtagggctgggaaaaaggttctgtgatgggacgacctggatttgaatctcagcaccgctcactggctatatgaccttggacacttaaccttcctgtatctcaatgttcttgtctgtaaaactgggataatataagcactcacttgaggcaaatgtggtagggaatagatattttaataaatgtaaagcacctagaataatacttgaaacatcacagcccttatcacaatgtattaaagttttctgtttatgtggctatctcccccactagactataagcattttaaaaagaatatgccttattattttaatatccccagtatttagcaaataacctggcacatagaaaattttttgttcagaatgttgaatgaatgaataaatgtatgaaattaaaaatatatattaatattaaattcctgctatcctgtcccaaaagacaatgtgctgtcatcactgcttgaggaagaagtacattatttcacacatcaacccaccttcatcctttgagaatttttttttagagcagaaatagactctatccaaaccatatggcataaagctgtagtttttaaagataaaggtacacttcaaaaaagtgctgactcatttcatccttagatacagaatactcatcttcagcattacaggcttgtgatggaagaatacaaaattttaaaaatatataaattcacctcttagaggtaaaggtttgaagaacagagttatttggtctacttgcaccattagtttgtttttttttaattttactttaaattttgggatacatgtgcagaacacgcaggtttgttaaacaggtattcattgtaccattagtttttaagaatccttgatctttaaaatgctacccacttggcctcctcttttattcatggccttgttctccaggagagaggctgaaacatcccttagggaacattttctgtcaaggtgctagaccaggagtgtgaagcagcgagccttaaattgcaggaagccacaacagcagaaggcagaacgctcctcaaacttgaacgcagagcctggtgctgcttccaggaagtcccaagccagcctgacttctgacagttgatctcaagatctcaacctatattcattttcacatcaagactttatttttgaacaggttccaggatacaacaccagcttttttattgaaggcaaagcattctcaattacttagatacttactaattaatatgattggcgatatggtgcgtatttagaataatctgagatgaaactcattgaagcagctttaaaaagcccattacaataaaaataatacttgaagctctttttttttttttttttttttttttgagaccaagcctcactctgttgcccaggctggagtgcagtggcgtgatctcggctcactacaacctctgcctcccagttcaagcgattctcctgcctcaaactcctgagtagctgggcctacaggcgcctgctaccatttccagctaatttttgtatttttagtagagacagggtttcactatgttggccaggctggtctcaaactcctgacctcaggtgatccagtcaccttggtctcccaaagtgctgggattacaggcgtgagccacgtttggccaacactcacttttcccaaaatgtcatgataataatattcagtgtggaaggactgaattctgagtcacctgcaaaccatgatacagtctgtagcagtggtactgagtgtaatccatagaccagtgccattttgcaaaatgttgactgaccatgatgagagaagtacggaaagtaagaagggcttgtaaaattttagagcaagttgacatcactgtgacatcagtatgagctcagtgctccagttcctctaaataaggtgccgaccacttcagacactgcagcattactcacatttgggcactcattggtagggccacattacaacatgtgaccttttaaggtcagtttgtcaaggataaatcaaattatatgaaaatctgagaaaagggaagcacttattttcataacttattttcataatctgagaaaagggaagcacgttatgaaaataattaaaatttaattaattaaatgtttatggctttttaaaatttatagtttaacattactggctaaataagggaagtcaaattagtattatgtatttataacctttattgattgattgatggcctctttttggtcagaaaaacatatatcttttttgaatgtgacaatcacagtaaccaaatgatgacaaagaagttgacattgaagaaatgaaagccaaaaaattttgtattcattttacttgaaagtataatccctcatatacaaatttttatagtttatgtagccataaactacagttttgcagccataattgatagcaaagtgctaaaaacactgtaggtcacttgaacaaatgtattggcaaacaaaacaatgaaactatcaaaacttgagtagcatttacataaaaaaattttttaaataccgagaataaaaaaaaatttgcaaaaaagagtattattaaaaagacaacaaaagtagatgttgaatatttcatgtctaaaaatgaatgtcttaaggcttcctgtaaagcagcacttacattactaaaaccaaaaacaaacaaaatgaacaatcaaacaaaaatcataaaattgccaagacattaatgtaaaactacattaaagaagtctacttggaaatgttcggtgaatctgtaacccaaaaaaaggaagcttgagtaccactttttaataatatcacaaatcagtgtttttaagaatgggctgatagcatagctgtaatgacaggaaaatactgtgaaatcattattcagataacaatgaaaataaatcaacaacctgcttcttttcttcagaaagtcttgccaggaggaaaaaaaaaatcagctgaacaacatgcttagagacatagtatataaaaactaatgcattaaattcaaggtttttacatttattatgtgatattatagaagatgaacataaagaaccgtagaagcatgcaaggcttgatggctgttatggggaaagattctgacaagaatgtttgaaatgggaaatgaactcttagcgttctggtaggaaacgagttttgtcccatgtttttaaagatgtgaattagacagccagactttcttatctgtctgacatcctcagtatttgaaaatatcttaatactcctatgcaagaaagggatgtggtaattttttgatgtatatctttatataaccatgcatagaagagtctgggaatatacaaaacaaaataataagagtggctaactctggagagaaatgacaaggagttttctcttcttttttttttttttgtgaaacagggttttgctctgtcatccaggttggagtctggagtgcagtggtgtgatcttggctcactgcagccccaacctcctgggctcatgcacacctcccacctcagcctcctgagtagctggggctacaggtgcatgccaccacagctggctaattgttgtatatttttgtagagacagggttttgcgatgttgcccaggctagtctcaaattcctgagctcacagaatccactcgcctcagcctctcagagtgctggaatcagaggtgtgagccaccatacacagcctgctttttctttcttttgcttctctgtatttatagttgtttttctaccctgaatgctgcctatgtcattagaaacaaagaccacagagtcataaaagggtcacacaagttcaaccatttaaaaaacattgtcaagagctttgcccatctaagggaccacatgagcattaatgactgatgggctccatacactacccagaatgactaacacatcaatgaaagacatgatgatctaaggaccgagggaggggtcgatctaaaacacaaaatgtccctgctcaatagccacctgcacacccacagctactgcgtggagaaaagagagagctggctgcagtccccctcctgggggaaactgtgaagcacaacagagacctgctgtctggaacctggtggctccctccccacagtgagcataccacacctgcactctcatgcccccacttctctcatggaacttccctgtcccttccctccagaagctacaagctctcagaatcacacctttcgtgctccagagtcaacaaggctgagtttgtggtgggcaacaaacagactaaatcttcacaccatttctcattaaaccatccctgttcatgagatctgcattaaaacttttttctcttttgtcaagagataaagcagcagtacacagctttagaggactagggcctccccagtaaccctttcctccaaacctttctaaacaaattatcattatcattggtgccgttatcagtatactagtactgttaaagccaagagatgacctgttttaggcaataacatttacaattcaatagcagagtttcctgcacagactgtactatttacagagtcctgcagcccctggacaagggaacacaggctcccagctgcctgcttgcagagttcccctgtgggaggcagtgagatggaaacacctggatgagaggccaggagacataagctcctccatccctggttctttctccagggaagtaaactaaggcagattgcccattctctctgctcctaaaccagaggcaattttaagtggcttccagcattgatacactaggtctctatgaaaggtgcaaacctttccacactcaatggattctcatcacaaccaaagcagcagggcagtgtattagttaaaatccattttagttgcaagtgacagaagataacattgattttttaaaaacaatggtggcttaaaaacaaacaacccaactcaaaaatgggcaaaggacatgaacagacatttctccaaagaccattctatggccaatgagcacatagaaaaatactcaacatcaatgagataccacttcacactcatgaggatggccagtagaaaaaaaatatatcaagtgttgttgaggatatggagaaattggaacccttgttccatgctggtgggagcatgaaatagtacagctgctgtggaaaacagtatgacagttcttaaaagattaaatatagaattaccatgtgatccagcaattatacttctgggtatatacacaaaagaatcaaaagcaggaattcacacagatacttgtacatcaatgttcataacagtattaatcacaataaacaaaatgtggaaacaacctattcatgatcaacagatgaacaggtaaacaaaatgtagtctatacatacacgggcatattactcagccttaaaaaagaaatgaaattataatccatgttacaaaatggatggcccttgaaaacattatgcaaagtgaagtaagtcagtcacaaaagaacaaatatcatatgactccacttacatgagctacctagattaggtaagttcacagggacagaaaggagaatccaggttaccaggggctatggaaagggggaagggggaattagtgttcaacaggtaaagagttttttgggggatgatgatttttaaagttctggaaatgatgtggtgatgcttgtacaatattgcaaatgtgctcgatacccctgaattatattcttaaaaatagataaatgataaaatttatattatgtatgttttaccacagtagatttcttgttaataatggtggcttaaaccataggaaaacaagcagataggcctggtatgattatcagggacccaggttccatccattcagccacctcaacacagggcttcctctttatgatccaacatggctgctccaactccagtcatcatctcagccatgcaacagggaggtgggaggaggaaggacaagggcactcctctacctggaagttcaaccttcccttgagggatactttctggaagtggcacacagtccttccattctattggtcagaacttggtcacatagttgcacatggcttcaagggaagctgggcaatgttgactttgttctgggcacccatcttttcagctaacattgaggaagaagagacaaacaagtactgaaaacaacaaccaatcctgcataagttgaaaatcaccttgagtgcaaatgttttttagcacaggactgcacacctttatgttttcctaggatcacagtcaaaaagaagaagctttaagaaatggttctgaggactttcttctttgttaagctcactttgcaacataagaggaattcagacctcatagggatgtgagctacatagttattcaccatataccctcaggaagaagtagagctaaactgagaagcactacaaagaaaaaataaatgaagaagaacaaaaatgaagataaagggtcactttcttaatgcctcatcctatgcattttgtagaatttgaaacccctggaatggaaagcataaagctctgacaatctgggctgcattcagccttggcagaaaccaggatgtgaccactggctcattcctaatgtttcaggtgggtaacaaatatttgctttttccggggagttgaccacacaccctcttccaattccttcaactcggactgcatcttgcccttgagaaaaaagatttggcaccttcagaacacaccattccccacacttcatttcccattaaggttgtcttggttaaaaatgttgcgggccaagtacatggtttcacatactcacatggttaagagagagaataggagttctatgagtcacagaaaatttggttgaaaaaaaaaggaatcaggaagaatcagtaacactaaacgcccacacgtctcgtctctttaaagcacattgggggaaattttgcttttagtggtaactgaacattctgttgctgctatatatgtcattttcagcagagatgaaataactaacagcctgggaagatttttatagccttcccgtcctttaagggatggcgtggtcccaattttgacctcccttttactactttcctttcctttggataaaatccatgtaatcctctgtaacactagaacatctctgcattactgtgtgcacacctgatttccgtaccgttttcacccctcattttggcagcaatctatgcataaaggcaaaaagttcccacacccctatcctgacctcttggtagccgtgaccctcatcccagctcaaccctcctggcatctcctctctcctgccaggtttgtggctcaagtcaggaagcacgtcagccctgagacctgcaaaccgaatcccacagacagttctagagggtgtgcttgactttggaaacccagtttaactggcttctgcttgaatcatcactccattaacatcatcattccagaaagtcgttgctcaaggtctaaagcacttgaaaccttcccttatatttaatatttattacccatcttgaaggaacggcatctgaggacatcctcccatcttgtaacatggctcccctaagaagggtataacatagtgattgcaaagcaggactctgtagccaaccatccagatgcaaattctgattccatcacttcgcctgaatataactttggataagctgactaacctttctttgcctctacattcttatctataaaatgggcacagtaaaagtgcatcctcattaaaaaaatggtctacaagcatatgaaaagatgctcaatgtcactaatcatcagaaaaatgcagattgaaaacacaaagagatgtcacctcacacccattaggatgaacactataattttttaaaaattaaaaacaagtgttggtcaggatgtagaggaggtagaacccttatgcactgttgatgggtgatagggtttggatctgtgtctccacccaagtctcaccttgaattgtaataatccccacgtgttgtggagggacccagtgggaggtaattgaatcatgagagcaggtctttcctgtgttgttctcgtgatagtgaataagtctcacgagatttgatagttttataaaggggagttcccctgcacatgctctctctctctcgcctgctgccatgtaagatgtgactttcctcctcctttgccttccaccatgattgtgaggcctccccagccatgtggaaccatgagtcaattaaacctctttcctttataaattacccagtcttgagtatgtctttattggcagcataaaaacagactaatacagtgggattgtaaaatggtgtagcccctctggaaaacagtatggagggtcctcaaaaattaaaaccagaaatgctgtgtggtccagaaatcccacttccgtgtccatatatccaaactaactgagatagatatttgcatacccacattcttggaaggactaatcacaatagccaagaagtagaagcaacccaaatgtccatggatggatgaataaatgaaatttagaatatacataccatggaatattattcagccttaaaaagtaagaaagtcctgtcccatgttacaacatgaatgaaccttgaggacattaagctaagaaataagccagccacaaaaaaaagataaatatggtatgattctagttatataatgtatctaagggagtgaaattcatggaaacagaaaatagaatgggttaccacaggctggagaaagtagggagaggggagttattgtttgctgagtgtagagtttcagatttgcaagatggaaaatttcttcagttttgtttcagaacaatgtgaaaatacttaacactactgaactctacacttaaatatgattaagatggtaactttcatgttatgcatttctttttaccataatagaaaaaaaatcatttaaaaagtgactcttcatagagcttttgtatggattatatcagttcatgtgtgtaaagcatacaacactggatggcacgagcgagcatttctcaaatgtcatcgttatcaacgaattcacataccctgctccatgctatatcagcacacatgaattattttatgtttggttgggtgcctttttatttgtttgtatggagttttgttttcttatttatttttgccttctcaattttctgtgttttctgaggcctgttttagaagctttacacatctattttttaattattccttaccaggatgaaaataaaaagtagaaaataaatgtctgagaaaaccatcatctgcatctccttcaatttcataagatacaatttgaagtgccgaattatttcatttgttttgggttttaaaggtccttctttttactgaatgagagggatgtagattggcagcagttgatatgaaaaaaaaaaaaatcaggttgtttccaaaggcagtgtgatgggctgccctaaagctgctgcctcaaaagaaccataaggttcagatcacaaaatataatggtctcagatttcctagggcctgttctgtatataattctctaagaagaacattgataaaaaataatacgtccacaaaaataaaaccaatatgataactctaaaatacatattgtaggaaatcaggttaaaataagtagttgtattttatctgcaaaagagaagtttaaggaaatactgctttgaaataaatgaagataagtcaaatattcattcatttattcagttctgaaattattcagccactattcactgtaagatttctaggtaccattctaggtgttcctagtccccattatgagcaaaagtcgccacttcactgtgttattcgaggagggaaaagtagatacgatgatggaggcatatttgaggtcgatatgagaaagttcacgctcacaaacacagctgtgcataacgggaatggctattttatgagggagtaagttccctgtccctgggaatatgcaggaggagaaaatgtgagcattaagaatgccaagaagaaacttctaactagaccccaaatatctggtgtagataacaatcaacctctcctccaaccaaaaactcttcgagtccagttttaaggcacatcaagtggagagaacatctgtattctcagggtgacttcaggacagaatgctaagaaaatcttcactactgacttccatgttgcctgcacgaagacccaatattccattgtttttaacacagacctataatgaatctgtaacacttattctattaaaaatagtcagctccctttgcatggatgcagattgatgatccatttttagaatctcaataatgattacaatggcacagcatgtcacctggaaggtatactgtagaatccttgcctacagggtttcactgaagctttgaaaagaacatgaagataactgctaaaacttggaagcaaccaaggttccttatataggtgaatggataaacaaagtgtggcacatcaagacaatggaatattatttagcaatgaaaggaaatgagccgccaaaccacgaaaaaacacggaggaatcctgagtgcatattgctaagggaaaagtcaatatgaaaagcctacatactatatgactccaactacatgatattctagaaaaggagacagtaaaaagatcagtggtttctatgggttagtgaggaggaagagaaggatgaatagggagagcccggggcatttttagggcagtgaaacttttccatatggtactatcatagtaggatctgtttttaacatagacccatactgaatcctttctgaaaaatgtgagcctactataatagtatagcctactgtaatagtaggctcacatttgtcaaaacccataaaacatacaacaccaagagcaggccctaatgtaaactatagactttaggtgataatgatgtgccaacctagatttatcaattgtaacaaatataacacactaaaaagcaaaaacaatcaaactactctgagataccaaaaaacaccagatatatgcataaataaagaaatagtgagtaattcgataaatgaaaaagtaaccaagaggaaacttcacaggcatgattcctttaaggaaacaaagaaataagcataataataataaacttctcatttctaaaatccaaaaactgttacaaaaggattcaatgtgatatttttaaagcacaattattgagcataaaatacaatctggaaggcatataactttgcaataaccttttctgtgtttaggtaaggttgactgcagagttgagagctgggccattgacatttgaggtcatggtggcagcagtccgccactattaccacctatgtccaaacatagctgaccctagcatgactcaggttgaataatattcaggaaatgaggccttgggctagggtcccagctcttgcaatcactagttccacaatttgggggaggtgattcttctaggtctctattttcccatacaagatgatatggtttggctgtgtccccatccaaatctcatattgaattgtagttcccataatctccatgtgtcatgggagggaccagggcaggtaactgaatcatgggggtggtaccctcttgctgttctcaagatagtgagtgagttctcatgagatctaatgattttatctggggcttttccccctattgatcagcatttctccttcctgctgccatgtgaagaaggacatgtttgcttccccttctgccatgattgaaagtttcctgaggcctccccagccatgttggaactgtgagtcaattaaacgtctttccttcataaattacccattctcagttatgtacttataggagcctaagaatgaactaatacacaataaatgcacagaagaggtcagctagcagttttcacacccgtctccaggagaagagaagctaggaggagcaggagggcaaggagggtccggctcccaccaaaagagttcaccctctgggggaagggctacttattgggcttttatgcaaaattttatttgaacaaagaattcctcagctttaaaaatagtggcatctggttccttttccctgaaggtatttactcaagccaaggaatgaagcacctgtgggtgaagagcagatgaaagctggaactataaaagccggagggaagctttttctcatttctaaggagattatcaggaagaatgtactctggcccctggaaacccatccaacctctcctctcccacctgggctggctgcagcagctctgcaggatgtcacccaaaaagctccgttcccaaccctgcggcccacagcctgacaggaaaaagaactctctcaacctggattccggggccctgtactctaatagagggctggacactgcctggctgtccccctgcttagaaggaagcaaatgtttattcaaaaatatttattaggtaatacaacaaactgtcaaaaaggaagaggcgaacactgttacagtttacaaacatgaaccatggattcttaacaaatgggagactttaaatggggatggaaataaagccccaaggaggggaaagatgttgtggaaatgctgcccagtgggaggcaggcttggaaccgcacgctggtctggctggtgataatctagtctagatgaagatctggacagcatccttctgctcagccactagcctctctttgctttctagtcagtgtaaaaagcatctcaaaaccattgctttcccagacttcagtctcctgaaatgtgtgtgtgtgtgtgcatcccatatgtgtgtcattttgtgtttctgccagcctttctgttgaaacttgccagagaaaatgacccacctgcgaattggcaaacggaacctgactgaataaaaactccttgattcagagcttaagaaacaatccagtggatttcttactaatctgggtgttcaaaatagtctttctacttacttgggctcaatattttggaagctattgtggtgaaatgagtgatcacgttggaattagacactgtactactaattgtgtgtccttggaaagttacctaacatttctgagcttccatttcctcaacataaaatgaggataaaaatgtccatcatgcaagattgtcctgacaactgtgctactgtctacaggatcctaagaaagagcaactaaaattatgttaatgttattaattataattttaatcatcaatactgttaataataataaaagactttaaaataatttcctcgtttttaacttactgtaatatcaactgtctgtggtagcctgttcacttgctttgtccttagtcttgtgatccatgtctttttcttatctgttagttttatgctgtctcttcacaagttctttttctgcgtgtgtgtgtgtgtgtgtgtacacatgtgtatgtatgcaagtgtgtgttccaacaggggttcccacttgcccattagaagtttatgctggggtctagataataaaagtaagaaatccaggactacacaaatgttaactgagtggattgaagagcaagagagttctcatcacagccaaacctatgagcacaatgcattgggcatatcagagaaaacgaagatctaaggtaaggtgtgaaacacagcacatgcaactcgaaatgctgaggggaagatctggtaggggggcctggtttgtgaaactcctccgatctgggtgcgccagtccgggtgcaatgtccagctcagccacttgtccccatgggaccttgagcaagtcactccatgattccatgcctcaggttcctgctctgtgagttgggaataacagagcccctcccagtgggttgttgtgaggatttggggagttaatccaggtaaagcccagcacagtcggcattctataagcgtgagcttcatcatgatcatcttatcactttgcgtgcatctggccctcctcacttacaactactgcaccccgtggtagaatgcagcactcatccaacaagacttgcaactcacttcatctctaaaatgtaacaggtccaggtaaaaaagggcagattgaacttgtgggcttacctctagaataatatcactaaaagtagaaattcaaatggacaaagggaagaaagaagagacaacagcctgtggaagatgtttgcaaaatttggaagatggaaagcaaataagagaatggcagttgatgagtgaggggacctccctgccagaggatggggggagtcagtaaagggaaaggcaatttgcaacatacgaccctgagagctttggaaatttgaggtcactcagagggtgggagcagggcaaggaatggggctgaaaacatgagagtgtatgagtgttggagaaaggggaaattcaagtgctccctcctcctcccacatcccctttctgatcccctgcagccaggtaaccatcctgtgcctagcaggtaatttagggttcctctccagagagaaatcagggactccaggctctgcagagtgagggaatgaggcaacatactgaaaagggggaccaagtgaatggcaaggtacctcccccaggatcttccctctacttcaccctcagaaccctgcagccaggctctaacaaccccaccctcattccaccaccctttccacagctgacaacagcagtattctcccccaggagatgctgaccaacccaagagaaagagctacttagacagtcacttatgggtccccaatgacatagtcaggtgctgatacccatcacggcacacacccccagccaacaagccccacctgggcacacagtttcctagtgaattattctgaattatttcctagtgaagagcatccaaggtccaccagacacttgtgaaaaacttccaagcattagaaatgatgaccaaaatctaacaatcacgaagaaaaaatgtggagcaaaaagagatgttttaactttaaaaaaaaaaactatcattaagatcctaaagataagaacaaataatacagccattaaaaaaacagttaaagatgccttgaataaaaaggatcagagaggaggttcaacatctaaataacaagagttccaagaagagaaaacatttaaaaatggaagagaaaattctcaaagaaatcatacagaaaaatttcccacaactgaagaggcccactgagtaccccacataataaaaggaagaagaccctaaacaaggcacatctctgtgacatttcaggacactgagatgaaagagaaaaacctaaaacattcagagaagagaaatgggaaccaggatggcatcccaagcttcttgataacaacaataagagctggtagtctatgaagcatcactttcactttccaaatcgtgagggaaatgtttcttaaagggaatcaaaggcccagccaagccatcaatgtgaagaactacaccaaccatgaggctgacaggataacctggagacaggggacccagcatgaaaaccaacagaatcctagggtgccagagggcagagatgccaggacagccacgcctggaaacagccggttccatctgtgagcacagggctccttaaagcaccctcccccacaacaaaacaataaaaaccctgagagatgaccaaattcattctaacacactgaaaagaggaactggttctgccaaggagtttaagggagtcttattgtaagtacttagaaaaaccaaggcaataaaaaaatcattgaaaatcaatgaaaaatcaattgaaaatcattgaaaatcaatgaaaaatcaattgaaaatcaatgaaaagttattgtttttgaaaaaatcgaacattacagcacactatatgactcagttctaagtaacatttacatagttataataatgttacaaatgcatatcaacttaaccaacattatgatttacctacattggaaggatggagaaacaggagatgggggaagggggcatgagctaaattctcatctaccttaggagaaaattgataatgtctgatatggtttgcctgtgtctccacccaaatctcatcttaaattgtagctcccgtaacttcaacgtgttgtgggagggagccggtgggagatgattgagtcatggggtggtgtctcccacactgttcttgtggcagtgaataagtctcacaagatctgatggttttatgaggggaaacccctttcacttggctctgatctgtcttgcctgccgccatgtaagatgtgcctttcaccttctgccatgattgtgaggcctccccagccacgtggaactgtgagtccactaagcctctttttctttataaactacccagtctcaggtacatctttatcagcggtgtgaaaatggactaatacaaagtccaaatgaaaagctcatgaaaacgcagtgatgtatcaacaaggaggtaaatgacagaagaaacagctaagaggacagcagttacctctaggaaagggggctctctgggaaaatggaaggcagagaactgctatttttcattataagcgcagaaatactatttgacttttacaactatgtattagcatgagaaatataacaactagaatagaacagtgataaaacatgtagaaaatttcacagtgaataaactaacgcatacatagataggcaaccgttttctgagagtcagttgtgaacccagaaaaggcataaaatccagttcttcagagccatcccatgctcattgcatgtaccaccagtttgcttcctcccaaaattcacatgttgaaatcctaaccctcaaggtaatggcattaggagctggggggcctttgggaggtgattaggtgttgaggatggacccttcatgaatgggatcaatgcccttataaaagggaccagagagagctcccttcaccccttctaccatttgaggacacagcaagaagatgccatctatgaaccagaaaatgggccctcaacagacaacaaacctgccagtgccttgacattgaacttcccagcctccagaactatgtgaaataaagtcttgtttatgaccatccagtgtacagtattttgttatagcagcctgaatgaaccaagacactcatcatcagggctgttgcatctgccccttcccaccacagtctcactaaagcaaccggaaagaggcaccaaatacgtccccctttgttatgttagtaacacagtcatgttataatacaaaataaactaagcaatgtcaaacagatcaacataattatttagtatgacataaacctcttccaaatgcacatgcaaattttttcattatttaccttttaaaagccttaaagcttaaagtgaaaattagtgtgaaaaaaaaaacaaatttctgaaaggtaatttgtcagtctatatcaaaagattaaagatacatatctttcatcacacaattccactttcaagagcgtatctcagtctgataaactacagcatggtttgaaacagtaattttcatcttggaggcatgtgagaatactgattcctgggccccaccccaagacagcctgattcaattggcctgggataggacctgggcatctgcattctgcactcaagattgggaattcctggtttataatatagaaaactagaaacagcctgaatactcaacagaagaggactaggtagataaatttataatgacagagacatacgatggaatactagacagtttaaaagtaatgtggcattaaaaatatcattaagcatacctatgaacatgggcagatacttctaatgtgctggtaagtgaacaaaacaggtgccagcacatatatataaaagtgtatatataatatgatcccctttggggaaaaacatgtgtataagagagaaattccactatctggaatgaaatgcattacttttcaatagccattatgtctgagtgcagaaagatttaatttaaatacttttgttcatctgtatgctcacggtaaacaaagtattattgacaccatcttctaaagttcaaaaatgctgttatatatcacttgtaagttttaaacattttagtactgttcatatagatttcacctcacaccccaccctaaatccatatacacagacccactcaaactctcacctgcagattctcagagcacactacatcctgccaagtctccagcgtgaagaacaacttttgcataggtttcatctttcctttgtattaataggtaacaaagtctggctgcctcaaactcagaacatccttgcaacactgttacacccactgatcttccaagttcaccttcacaaatgtgcaagggatgagggggacaaagaccaagtcaccagcaccactcctgatcccccagattccagcccaggtaaaccattcagcatcattggtcaaaggtattgggtcactgaaggaggagaggggtagaaacaaggcattgattcaaatacttccaaaatatgtatgtgttttcccaagcagctgttactccccagcttgaggaaagtgctgagttacagatgatggagtatgaaacactgagagagggcacaccctgtgccttcgcagcaagaatggcagagctacagtggctttggtgttttacttcacccacttttatgcctactcttttcttagcgcccccttcccttactcattgcatcaaagtgatccactgaaaagaattaagtcaactgcagagttccagatagctatcctcaggagttttaaaacttaagatgaaagcagtcagggaattaagactaaatcccgaatatgtaagaaaagggctttcccacgtggcacaatacacgtactgtctgcttcacaggtccagcctggtagcaatcaggcaggataccagagcacgcaggaaatccaaaattaggttttactacctataatggaagatttacgggatggtttaattggtagtctcaggactaaaacctgaagcaggggaacaaaaacgtctatctggacacagccagtgagcccacgtgcaccccatgacactcgctcataggacacacaggcccgaggctgcaggggacagagtaaggtcacaactcctccttctcccaaccttgatgcacaccaaagccaacaacatgctatttcctgttccttttatttaagaggcaaatttgtttcttgtggtagaatgggtcttcaagctacacacacaaactcaggtgttccgcaaaacaaaagaactcattcaattcagtcctcccctgtatttccaaaccacaggggcaacactcacaagctgcaaagaggattccgccccaccgggaatgcatcggtctgcacctgtctgttgccattttcagggttagcagggccactggaaaatttcctcagtaccattttgggtcaatgtaaaggataattgaagtgcatgtttctgtaaattccacgtgctcagagagatttcaagtaaacacaggaaaataagaactgtgggcttgagccatatgttggctggccacgtggggcaggaagaacacacactgtccaggcagtgagtaactgaaaaccaagtgcccacagacaccatccactgccagaacttgggaagctggggtcccaagggacagtcccctctgctcaccctctcccctcctttctttctcaccctctcaacaaactttagtggagttggctttttttcctagaggccttcatagccactttttcccctctccaggtggtagcctgggacctactgtgcagaaggacacacaggtctgaattgaggtcaagccaggaagaggaagaagtgcagagcagggcagccactggcttctgaaatccaatggaagaggcggcaccatttagtagcatgacattctgtctgcaaaccaccatgatgatattgttactaagtagaagaatcccttttaaaagaactttcgatatattataacatactataacaagatgggaagacattttccttttaataaattgattttcttaaaggagatttcaactttccagtgatggacacttttcctggcttccacttgttttctgaaggtttccatttgggtgtgatttcttagcaaacaagagccttcccaaacattgcctgcagacatcttggtctgtagaaacaccttataaggagatcaacgtataacacagtctttttctacctagagaattagcaaagggtgaaatttggtatgacaggggtcttccctggattcctttcaatgtagtccaaggaagaactaacttaggctgaattctattaagacaaggttatcacaatatttacaagattatttatcaggattatatcaattaaatattttgggggaaaaaattgccatacaaaaatcatattaaaattgagccaagcagtgaaacaactctgaaatggcctagaaataacatgtatttgatattcactttttctgaatacagatgtgatcttcatgccatcattgaccccaggtggtaaggatcattaatgtttctagaatcctacactgggcagctgatgcctgtaatcctagcattttgaggggccaaggagggagcatctcttgagcccaggagttagagagcagcctgggcaacacagcgagaccccatctctacaaaaatattttaaaacttagccgggcatggcagcatgcacttgtagtcccagctacttgggaggctgatgtgggaggatcatttgagtgtgggagatggaggctgcagtgagctgtggtcacaccactacactccagcctcagtgacagaatgagactctgtctcagaaaaaaataaacgattttaaaaattttaaacccttaaaaataagtaaataataaattcctacactgttgtacagttaacggccccaattactaagctcaaagggaattacccagaaaaggcaagaaaaacctaagtgtgaactatggctatagagaaacaaatatatggcttgtaatataaataggtttcatatacataagagtgtaggcatacattgcaatgtatcatctcatctgaccctgctaccaaataaaccacaatgtgattttgctactgtggaatccactgtgaaacgagtcatatttcaaagaggtatttttagtgatttttaagggcaagaattcacagacttcagatctgggttccacgtgaccatgacaagcacttggtcagttctgcggcttgggctccaaattcaatgtgtggatcaccactgactcaaactaactctatctgtaagatgattcaaaagagacaatttggaaaaacagaagggaggaaagacttgagaaagagtgagcttttacaactaaacagtatttgcttgaatttaaacaccacttaaaacatagacaacaaagacaaaaagcatcagtgaaaatgtatgtcccttttacattccaaatacaggcccagaaagcaataagcaaaaggcacagctgggctctgtatagccgacttgttgatgtttaatgcaggtaccactctgatctcagcccccagatagaagcatatactctagtgatggcccaggaagacgtcgaccagcacaaagcatcaccacacttcccacattctgagttggatgcaaccattctcttagaaacctagtcttgactgggtgtggtggctcacgcctgtaatcccaacactctgagaggccaaggagggcggatcacttgaggtcaggagttcgagaccagcctagccaacaggacgaaaccctgtctctactaaaaatattaaaaaatcagctgggtatggtgaaatgcacctgtaatcccacctacttgggagactgcggcacaagaattgcttgaacccggaagatggaggctgcagtgagcaaagatggcaccactgcactccagcctgggtgacagagggagtctctgtctaaaaaaaaaaaaaaaaaagcaaaacaaacaaaaacaaaacagtcgcttctgcactcatggtaacatcctttaccatttaatctctcctagaagacagggcattgccataccattactcacttgaagatgagaagtggaggatttgttaggactgcaggtgatgaggagagactcaaacagaatgttagattctgaccgatctgctctggtttcacacacttctttcccttcctaagaatctgcttttcccttcatgtactttttcctgttttcagtatcactgggtcatttctagtaactctgcttaagtgatcctgtcagctacagggcgtgggtgggttattcagctctgcctcacagaacactcaccctccatctctgagtcagttgccttttaatggaaatactattcgctgatcatgttcataccggcccagttttgtttctcttgacaatggcccaggtgtttttctcttctgattgagttttggggtaagctcagcatctttgttgttgttgtttgttttattacatttccatttttactggaggggaaagatcagagtcaatgtgatccagctgctgcacgtcagtcccgccacatgacctgcactgttacatccaaagcgtgcagggaaaaggctgcgtgctcaggtccagaagttcataaaggcagcctctcccatcagctcaccggtggctgccagcctccatgccgccttgctctctctaggctactggtttttgcaaccttctgcttttgtccactcataactttgataagtaccgtgtcaccttctcatacgtggaaaacatgtggtcagcgattcggcatgtttaatggtgcttgaacaatacaaaggggagctgtcatccatcttttgttttctcattatcagttttcaggccacgttctaaacaaggacgacaaccaacagaacatcattccctggtgtcccagtccttgcttactttgaatctcctcaccaccttcagtcctttctaaggtcacgtacgggcatccaccgtcttttttcctaaacagaatactttgcaaagtcaagtattggcatttcgtatttaagccatgcatcctcaaggaggctaaaattagttcttgaaggatgaaaaacgtcttattccttttctgtataaagcacagatatacctaaatgtagacatacgtatatgtataatgcaaagtactaaaacagtatatctgtggtattaaattttcatgtgaggagggacaattaggaaaaaaaatcagaaaatgctttttaggaggttgatcatgaaaacaggaggttggtcatgaaaaaaaaggttgaaaaacactaatttaagcctaaatgtaactacattacaaaatgtcactacttcttgctggttttggcaccagtgcctcaggtgacacagaaatactaagttttcttttattctgatatgcttaaggtatccccaaaatgatttctctaagttgggaattgaaagggttatgttacactcattcactctttaacaagtcacatacacgtcacctcctattttagaagccaatgggtattaaagcacaagaaataaaaccactgaaaaagcaaaaaataaaaaggaaagaaataaagactcggcactctgacacagatgaagcagatgattatgtttatttaaaacagcaacttattttttaatgtctatgaactaaagatttctcaggacatcttatttcatgttaagtgtccaatgcagcaatctttgccttgcaaagcccattacaaataggcttgtgcattccagaaaggaagcatgcatttaactttcccaaatatgtaatatgcaattcttttttttaaattttttacttgcttggagcaaagactgaaagcaagtatttaatctcgcttcctttgccagtgcaaacgtaactaattctgatcctcatttccatttcttccttaatctttttaaatcagggttgggccagcatttattcccaaccttttggagaagtagcctgtatttcaaatggggccgcgatgctaccgcatgttgtcctgaccagtgccgtcctgatccttgctggagaaagaaatggaggcattttactcacaatcacagagcttacgtatgccagcattacagaatgcaaaaaataactttgcaacaatctgaaagggtaatttatggagcgtggacagtaaatggggtatgttttctgtcctgaaaatcccagatgagggcaggcttatgaataattttcaaaaatcaggaagtctgtggaaatccctactgtcttataaagattgcaccgtgctcatcgcatctcccacggcctctgcctcctcctccacctcctccgaggttccttggtcctgactcctaatggcaagggccaaagaacacaggcacctgcctccagcaaatccactccgattccccctcattcccagacacaaatttccatgaaaaccagacagaggacagaaagcaggggcaggatattccaaaagcacttcagatctgcagcctgatttcattggactcgctggcttgtttcttttagtccctgggtgtgttgactgcaggagaaacctcactaacgacgacacttcagaactgtgagtccaaacacttaaggaaggacgtgcccaggaggaaggtctagaagctcagagacagtgaggaaggggcattgctcagcgatgcttagatgccttcatgagctgactctactgggagtcacttgtcatgcccctgaatccacccacacatctctataacatatgaaaactgttcagcccaaaggaaaaaataaactcgatggttctcattaatccaagtttaactaaacacaacagtttccaagagtacatttcagccatttcgcacccgcagatacccaacctgagaagctgatgggaaacggctgttttggcatcaccgagggctgcggcaggcagcacccagggggcttctgtctcccctgtggcgctgcagctgagagccacacccatgagctgatgacgtagcgtttctctcaaaggtctcccttgatgatgtggcaaactgcaaggaccaagcacagaggcacctggacaccaacccttccctgcgagccacatggccagtcaaacgttctggttaccggggatgacacgctttttccgacaagattttaagcacttgtggcttacatcaatgtggtctcgtattcattgtgtgtttagaccacttgcctcgcacgttctcatatttacacatgttcactgaacgtaacctcaagtgaattatttaagaagccttaatgtgcttcagactgctcaaatataatttagactttaaattaaatttgtactctgatacgaaactgcaatgcttgaatgcagcttacggcatcaagtggacatgcaggaggccttggaatagaatttcagttacccctaaagggctcacacctagtggcccacgttccttataggacgaaacaagattcaactacaaaatccaactcattgcctacgtttgaaagctggggagcctgcagtacacaagataaagtcttgcttctccatttgtccttacgtgaccctacaatgaagcatcgctacacaccagagacgtataatgctagacgcgagaacacacagtcatgctccttggtcagaggttttgggtatggttgggtgttttaataaaccacaatattccttctccttcactgtttggttaccaataattgtgctgccttaggtgtaaaattcaatatggtgattagagtctagagaagccacacttattttatttagcagtttttgttttatttttacagtaagcactgcccactgggaaaaataaaccaaaataaaaagagtgaaattcccttattatgcactagcgataatgaaaacaaacttatctacaaagaaccacagacgagaaatttgcctagagaccagctactggaactaaaaacaaatttcttattcaggaaaatgtgaatgagtaagaatctgctagtgaagtttcttactttgcacaaaaaattaaatgaaatcttaactttaagagtagcataggctgggcacggtggctcagcctgtaatcccaacactttgggaggctgaggcaggaggactgcctgaactcatgagttccagaccagcctgggcaacatggcgaaaccctgtctctactaacaatacaaaaaattagccgggtatggtggtgtgcacctgtagtccctgctactcaggaggctgaagcacaagaatcgcttgaacccaggaggcggacgttgcagtgagccaagatcgcaccactgcactccagcctgcgcaacagagcaagactctgtctcaagaaataaaaattaaaaaaaaaagagtggcatagttaaaagggtagaaggttactcaatgacgcatcacgtatagtacacatatagcacactgataataacaaatggcatgtaagcactgtggattgacttcagaagacttttccataagcttcagtatcacaaacgaagggaaaagcctgtgttatgtgcaacctgtcatgatcaaatagtgtgaatatgtccttgtaaaggttaattctatagcaatacatttagttgatgtgctttcttcctctgggattctagcactttaagaatgccgttcttcaaaataatcaattgtattattctcaagaaacatgcaaaataagaaatttgtcatcaagctggaattatctttaaatagaggatattcaaatagcatttttatgcctggagttgtcgcagcatgattccggcaaaagccgcactatttgttagctggcacacagagttttggcctgaaattcagtattttattttaccctttaaaagcatgaagtgactcaacaggaaattatacatacatttttccctccaatgtaaaaactgcagatctagtaccgaacatgtcacgctggcattcaattttctattgctatcatatctggttccttagtgacataaggtcacaaaacttctactcctgtggccaagagacataatagatgttgcggttgctcattatattaaatttgaattcctaagctaaacattctagacctgcactattcggcatggtggccactagccacatgtgactatggagcccttgaaatgtgaccagcccagatggagacgtgctgtaaatatacactacacaatggattttgaagatttcatatagaaaaaaaataaagtcaaatatctcatccatattttacactgattacatttgaaatggtagtattttcagcatgtgttacataaattacattattaaaattaattccacctgtccctgtcttttttaatttggctactggaagatttaaaactacccttgaagttcatgttctatttcctttgcccagcactgccaggaccttacacggactctgcctccacgtcactcgctcccttccggtcacttccataacaggcccgccactctgaccaagataactacacacagcagagtcccatgggtggatctcagcatccgcctgcctggttctgatgctgccctggttcccactactgtgtgactccaggcaaggtgctcagcactcctgagcctcactgctattctggaaaatgaggacaattagagcacctcctgcaaagagccacagtgaagacagtcctggcaaagtgtctcctgtggctataccatctggtgagtgaatgtcacctgccaccttccacaacatcacacctctcccttcccttatgtaagactgctttcttccctacctcttaactttacacctgagatattgaagtaggtgtctggtctgatccctccaacactccagaggatttggtcagtttccacactgtgtgacccactcccaggtaacacttccaccctccaaacacaccagcaggcctgactcctccaccctcccgcccactgctatctctaccattcccgccaatccagatccaacacgccatggcacagctcaagggcctcagcctccgggtagcatgctctgatcctctgatcttcctatggaatggtgtagattgcttttggattgcatgattctattttatgttatttatactctaccttgttcccaaaaagggactcaaagtggtctacaaggatatatgcaatatgacaaggttgtttaaaattcagaagcaaaataaaaaataaagatgaagctaaagagaaacaagggtaagaacataaactcgagctaggaatgcaatggcccgccaggcaggcctcagggtctcacatatctgctggagttgggtcattcacacgtctccaaataatgaaatccaaccaaatgctcagacaatgactcctgatgctaaggctaaaaatgaaatcctccaatgattccataagaaagaaggacctgtgtgatagcaagcatgcccaagaacggccctacagcaaacccagtgtattgcacgaggctgtctccctgctcgggaacatctcctccattgccatacagtctagagccctgttcactgccatgctggcccagttcaaccaggtggtcccactgaggatgccactcttgttggtgtgtgaactcatctccttcgagatttcatgatgtgcacattcacccccgttctagatttcatgacacaagcattcaccccttttctagattctatggcaagtatgttcacccactttccagattgcacggcattcgcattcaccgcctagattctagattccacggcatgcacattcgcccactttctagattccacgatgtgaatgttcccctcctttctagactctgtggtgtgaatgtctgccccaattccatggcattcttgctcacctccctttctagattccatagcatgcggattcatcctctttctggattttgcctccctgaaggcactgtgcaagtcttctgcatagtgtcttgcatgaagtcttacacagaacataaggcaaaaacatggactaaatggacagcttgccttccaccacacagtctgtagcttctagcctcccttcctttgcacgtgcctttcccaggatccggagcaccccctctgtggatggagtcctgtatcttctcaccttgagtcaaatctgactgcccgctgatctctgcctactcagcattccctgaattctcaggcattccacttgtcctgtattaatttccacctgtaggtatttatcctaaggacaccgcatttagagtgtccttgcaagaggggatgctcctctcttcagctaaacttagctatttaaagtaaaaagggtggtagttttgtttacctgttaacacaactcatggaagagagaaaaattcaagcatgccactaattgctgcagtcagacagacaggtggataggcgggctccatagcggaatgttctggcttctcccactaaatttgcagttgttcgtctaatctctagacgtgtcccgtgtcttaacagtccctgtatgacttatgctcccacctcttgtttgggacagtgctctcatttaatagatgctcaatatattttaattaagaaatgtattttcacgttgcttaagacccataaagaacaattaatacaatgtaatgcttaattttgcaaagaaaaagtttatattgatgctaaatgcatttacaaatgtgctcgtaatgtacaaacaaatacagcccttactgtgggttacacatacttatgaaatgattttattgacttacctttggttttacaatttggctatggggtacttagaagaaactgcccttgtgggacattctgtctaatcacttatatttacaagccttagaaaactgtaaaaatatattcagtttcattaagagatattcgatcttcagaactgatactatttcatctataaaatccttttactggctgggcgcagtggctcacgcctgtaatcccagcactttggaaggacgaggcgggcagatcacctgaggtcaggagtttgagaccagcctggccaatgtggcgaaatcctgtctctactacaaaaattacccaggcctgttggcaggtgcctgtaatcccagctactcgggaggctgaggcaggagaatcatttgcacccaggcggtggaggctgcagtgagccaagaatgtgccattgcactccagcctgggcaacagagcaaggctccatctctaaataaataaatacataaataaaatccttttactttgatacctcaagtagtaatcaataatatccctctctgttctaatggcagggcctttaggtaaggtttcagaatttgggataaatactaataatatgctgatctaacatctcttctccagaagactccctagatttgatttttactgtcattatttctattttaaaactctgtagtgaagtaagttttactgtcggggtcaaatagactagaaagtacttttcaatactgaagaagcaaatttttcctccacttttgcttattctgtcctcttgctgctgtatcttgaactgcagaaaaagcaagccttgcacaaggcaagtttaaactttgtgcaattatagacccagatttgtaaatctggcagcaggctcacatcagctttgtgaggttgggtataattttaatgagaatccattcaacatatgaaatcttagaatgtttctcaattagcacttggtttcttttcaaaatgtttttacctcatttcctaataaaagaaatctcagctttctgatacatttaattaaaaagttttatgttgagattgtaaatgtgagtggtttctgtttcaaaacatttcattttgctagtacatccttcacttattatttatactctgcttagatctctgcatttcccatgcaaaaatcctgaaatgcaccttcttcagtgctgaggtctaaagtttccccttcctaagtagtgccacagtcaccccctcttcctcccacagggccctcataatagcttctttcagtccttcctctgaaccctgagacccccgttcactctcatgtcaagcagaattccaagccttcattgcacacagaggtgggtccagggaggtatcccgtgtttctgaaattcctgctttgcctgtgcctaagcttcccaattctcccaagagtcctcattttaagaacacaatgcaatgctagcattgcactagcattcagcatctcccaccatacattgcaaatggataattagcttgattgctaggagattcacctgctatcccctcttctcaccctttagcaatgtgtgtggaacgcacttggctccgaacaaattaattgtgtgtgaggggtgacatctgactacgaacaactaaaaagaaccatttaatcaggccaaattcccttcaggcttattgaggcttgagtgtggatttttaaaatgtaagcagcactgtcactgtaaccatgaaactgtcatggttttaagaagtgaagttttgggggacaacaacatgaccaacagactctacctcagcatccagttcccagattagttaatacaaacttgggccccacttttcaacagaagcacagctctaagtaaaggctggtacccagctctgccccctcaaattatttggtgaacaggccaaatgggaggaattgcaggtagtactgcagaatctgcctgccttggaaaacaggctttccatgaaatacagttttaaggtccccagaggccagggctctctccctcccctactcttcaccgcgccccccgccaacccacacgtgatgagaaaccactgcccctgcagaggccccagcagcaggcaagggtctgtggaagaaagagaggaatattacaaaggggtttctggctggaggggggttccagggagggcagagaggttcaggctccaaagctggcagcagcccctacagatggaaagctccagtgacaggacccatgaaaggacactgcagagcttgtcccatgtcattgggccatcgagacatcaagggctgcctggatttcaggaactcacatctgtagaccaagaaggaacagcacgttcccattgccaatttcaatcaatttattaaactaaggcaataggtaagtaacagatttactaagatattgggattctcttactgtccatcttagttcagatggagattcacaacaccagctaatctgattccaggatgcagcttctgacggtgcacaagctaatatttccttaagatagtcacacaaacctccctgccaggcgtgcagaaaaatgtgcacgctccaatttagtctttcttttactttccaactttaagtactttagtgagccccaagaatgcatagccactctttccacccagttagagagaaaattaatctttctaccaataacagagaatcacttaatggaaataggacgatagtacttcactaaataaggcttcgctcctttgctcccctactctcaaaactgaggttcaaatgcatttctacactttcaaatgaacatgtgggaacttttgctgaatgctgacatcaagtgaaaataagggtttcctattttttaaaagtcattctatatatgcctgttttctttcctatttcctagagagacagcttttcccccccgagtatgttttgcaggggtaataattactgcaataatgttatccttaaaagggagcacatataagacaaaagcaggtacaaaaatctcattcccactaaaacaattcaaaatcataggttaggctttaaaaggaagcaactacaaatctaggttttaaaaacctttagacacactaaagatttgtcccagatcacatctgatgtctatttctctgggataataacaaaaaaaaagaggtgataaattaattcaaatggcctattttacatacttgaaggatatttccattgtctcatatagccattctgaataggacagagtcacataatgaaacttcctttgcacattctcctgaacacgcactgagtcaagatagccaaaccccttactttcattgtaaaattactgtttctcatacgcaatcagggtctcccagattatgacatgcgaccctaaaaataggagaacttaaaagttagtttaaatctaaaacttagatccagcgctccatttttagatgcaccctttaatttcttggttttgtctacattttacttatacttaaatttagcaaagtaattttagctcaccctccttcactaccttcactagactttgcaatgttacaaacatgaagcattcaagcctctttctaatatgaaaatgttttaaataaaagataaagttaaaagggaaagatgccccttttaactttaacttttaacttttttagctatgttgaagaactggtttgggtgacagcccagccattggaaaagccattggaaaactcccgctgttgtttatttacaaaataactgctttcaatcaatcattgtgagaggtccgtacactgacaatgcataatggacaactaattaactgacccctaataagagtgtgggaaataccagggagaatgctatcatgcaaggaacagcaacaatatggaggggtggctggtcactgccaagcatgagcatccccaaataccgcagtgattttcagagttttcaaaaagccctactcacaccactgccactaagtaccataatcatcggaaactgtgccccaaagatctgaacgtccctgttacatcagcctatttttcttacaaatgttgctgctaaggttcaaattcaaggtgtagaacattaaacaatagctgtattgtgaaggaccatgctccctgggaaagcccaagtaaccttacacactggggaaggaaaaaagaactcctttgccatactcctgctctctggaaaactgctcagacgcaaggggtaaagaagcaaagaggtgacaaaaagagacctgcattcagagagatcagctgtcaacttaaactgagaagtgacctgatgcctcacagagctgggattttgccaccttgaccaaactgcttcccaggctccataagtctcattagaaacgtaggtggctctgtgtcgacaccttctcaatggagttctatgaaataacaggcatcagacatttattcactatgacaatgtcttcccaccactccagatcctatgaccgggactgacttgctatcggtttttgcctgggaataggaaacgattccagaaacattagctcttctgttttgagaagaaataaattcccccttttatttcttttttgtttaaagatagcaagataaaaataaaaactaatattacttttagaaaaaaaaagtgttgaaagtttcctattaccctacttacaatgtgagatgcatttaaaagatacataacgtataacattgtagaatagtatgtgagttacacattccttctgacgtctttcagagatgctttccttcttacttatgtatctggtattccattgggatcttaggtcttaccacaaataaaatatctgattttataagattaaaaactcaacaaggtttttctttaatataaaagcaaaacgtggaacgtggaggggggaatgtttatatacaggtgtgaatgcagcccctcacacaatcccttcaatggtaaatgctaattttctaaattttagctaaagattaaatcaccaataattcctcatgaaataacagataaacgtgaaatcatgtactacaattctactctaaatttttttaaatagaatgaagtaattataaaatgttacaaaagagaagaaactggaattataagtgctactggaattatatattccttaacaaatatcttgagacggattacccatttgctaattcagtgtactttccaaaagccattgacccaaaccgaagctaggattaccaaatggcaaatagcatttgtgatgtgtgtagctcttctaaagcctttcttgagaattgtaaaacttgatatattagccacaagtttacatagctcaccgtttctgctagaattataatttcaatggtgtaattagcttattaataatttgacacatggtgaattaatttacatggttgggttcttcgcaacgtctgttgcctgatcctcctgtggatgaaggctatgagctctggcctgccccgggagcgggcaccagccaatgccagcggagcaagggttaactttgggactgtgacagttctcccttcaggggctctaaactacttggagagaatggaaaacagtcaaaaatagtcccaaaggtaaataaactctgtgtcctatgtatgtcacccagggaagaataaaatgtatttttactcacattgaaagttttctgaactacaaaagctatagagacatgtacagagtgaaacctgtagcacatacgaatatgttattttgaaagataaaggaaactatctttagattaacgatgagttgtattaaatccacatcctcattgaaattgtttatccattttattgcgcagtgtagtctgctattaataacagaatttgtcctgtacttaaaagataattaatgcctctatgcatctatgcaacataccatagcaataaacggacgatgtatttcagacagaaaccaggtaaggctagctgataaaatacagactatattttttttaacatgccaagttttgcaattagggtggtaaactggaggcaaataaacttaacagctgcaggctgaagaatggaaaggtgaaaagactgagactgagagtgggaaaggaaagggaccgctcctggcgctgagagctggtcccagagccggtgttgcggggtgtgcgggaaggcgccgtcgggggtcattccaccatcaggacccagcggacagtgacaacccagcctcaaacctggtccctactttaggccaagcgtcagcttttttagttcaaccctgatttccactccagacaaggacaaataacctcttggtcggggccccagatgaagtccccgcggtgtgctctcctggcccttgtcaatttcggggtgccccctcctctccatccgcacccgactgcacgcgcctccctgggaccccgcactggcgagccgtccctcccggcgctggacgccccacctgtcccggcgccgtcggaagagccctgcagagtgagcccctagggccaccccgctgccttcctccccgtccccgcagccgctgtagccagcgtgggagccgggcaggtcgcgtggggcgctggacttaccgagaggttagcgccgccgtcgggggagggcgtgtcccgcacgtgtgtgtccgcgcgtgtccgcgcccgcgtgtgccagcgcgcgtgccttggccgtgcgcgccgagccgggtcgcactaactccctcggcgccgacgggctcagcccatggtgtgggcgccgggttcagggaggctccggctcccgccaatcgcggagcagggcggccgccccgacgcgcgacttgcgaacccggagtgcgcgccgggggcggggcagggacgcgtgggcgggaatgcacgcgcgtggccaggtgcgcgtgggtgcgagcgcgcgggagtcttcgagtgcgcgcgtgtccgtgtgcgcgtgggtgtgggtgtgctcgcgtgtccgtgcgcgcgccctcggggccaagagcgcgggccgcgcgggcaggtttggacactacgcgccctgctcgggtttaggacgcggctggcggctccgggaggaagaggaggaggaagaggaggaggcggaggaggaggaagaggaggagggaggcggaggagcagaggctgggacggccggaggagagagtccggccccagcaggaaaggaacccagcacgcgactactggaggggcgaggagcaagggaaggaccagaggggaggagagggggtcaggggagggaaagtgtgggagggggagccgcgggggtgcgcgctcctcctaactcggggtcgcttttagcgagaagtgatatttttccagcctcattgaaaaccgttgcaaacattgaaaatagtaaaagtgaaaacggttgcgacactaagacgtttataaaatgaccgcggactgccctcgatgctgatgagaactgggacgacgtcgcgcagagcgtccggagggagaggcgcggtgcccgggacctcggtcgtggggaggagccggatacagccgccgggacgcggggatgccgagggcaccgcggcctggtctgaccgacgcacgcggtgacagccgcccttgggagacgacggcgtctgcaaccagcagcctccaaagggtgcagccaggaggctcagcttgtccgcctccggggctcggggctaagccccttccagaagttttcgtttctacgcgaattccgaccgcaaaatccagcttacctgagcgccgctcctcttctctcatgtccctcgggggccgtcacgaccgtcccggagcgatctctaggaacctgtcccgcagcgatctcttgcacactctccccattccgaccaagtgaaaactacccatgtccctccctctccaaactttaacagccaagaatttcagcaaacagccagaaagaaagctaagtctccccccgccccccaccccaagggaagggagggaataagcactcctttaatttgaaaaataataattaaaactccctcaacttttaaggccgagcaacataatctattaattggtcgctattaacatgcagttttattgaccatagcacacagaagtctgattgtgagggaggagtgttttcaatgaaagtggagttattttagctgcagacgtgtttacatttctgtggtttagtctataactttctctttttcttgcttcagaattctgctccatgaagcaaagcccttagctcccagacattccaaaaagtctgccaaaataatagaaaaaaagagagggaagaaaaaacacacggagacccccaagtctgggtcaggctcagggttggatgtgggcagggtgagtgtgccccctccccgcgcactttccagttaggaaaaaaaaaaaaagtttcagggctccatttcctgtttgctgggggaaaaaaataaaatggacctgagcagctgagtttagaaaccgccttttccagtacctataggttctgagaggatctttaaccctagagatgccaaaatgagctcattaaaatgtgagactccagccaaggaagtttttcccctgttaagatggacagccttcgtgaaactacaaatgcattcctaggaaatttcttgaacaatcaggcacaccatggtagttgggatacaagcccacctctccataggtggccaagagaagataccaataaaaataaatattgaaaacagattaaatttctgacaagcatgcaccctttttgtcccctgaggtacaaagaacagaatgtatatttcaaagtgggtatttagtaatagggtcttgtcagtttatccactctgtgctcgaatcgtcatttgcaaagtcgattgcatttcctttagtattgaatgtgctcacaaatcacacagaagtccccatactccagttcacatggccttcaaaaagattcgatctgaatctccttaactaccaaatgcatattttggttccttttctttctaattattctccaaatattccagatccaagatatttcactggattttgaaatcttccaattagccactaattttcaagtctcaccatagtgaacccttaacatttaggggaatgctttaaagtaaacaggttctgaacctattcaataaaatcagtagcccacaggccaatgactcttttttaatactctaaaagttttttaatacgctgccaacgtttctcaatcatcatcagtatatggtgaatattatcacaatatagaacagtgctaaaaacaatatgcgtgctgatgaacaaaataacatttaacgttttaagaataatgaactgcactttaatagtagaaggaacatgatttcaaaatgagctcagtaaaaacccaatatttgaaacaatgttgtttgtgactctccctcactaccatctccagttcccccaaaagacactgcagaaggagagagagagagagagagaaagataatttcttaaaacatgaaagacgcataccgatcccattcataaaatgtgggtcattaaccttgaagaatctcagtatcccaaatcctagaattttgcatatgacatcatctcctccaactgattgcatcttgtagttatagttaggatgttctttctgctgtctaatctaatccctacctatggccgcagcattcccttcagtctgacccatgatttaggtcaaataggaggaaatcagtttcaatgaattaaatcatttcagttaacttgagaggccgaaagaaaactaagagacaacttcacgttctgtattgcaggacaaacatcataattctaattaaaatgtcatttaaaaggaaagtttttataaaaacaccacttgacacattccataagaattagtattttaaagtatttcatacatgagatggtcttctttttatataaagttttgtggtcgacctaattcattttaaaatcccttttatccaaaagatgttttggattaatttaagtatttgttactggataatgtcaagctccttttcaatgaaatgtcctgtgttgggttgtcacacctgttaaatataagcctccttttcttttgatattctgagaagggctttaaaaggttttcatccctcaatatggagatttaattgctttacctataataaaaataatccctataaaattcagattgtggatatttcaaagctgaaagaactattggattgggatgtaaaggttgcagttcaaaaagtcttccacttttaatataacatgcatggtgttatgagttataaaatcctggttatcattttgaaaggtctggtttttgttgtccttgcacggagcgtctttgagcttactttatggcttagcagtctgcgtgtgcgtgtgttaaatatggaaagggcagcgtatccctctacagtaaatgctcacaagggaggaagtctcagattctgttttaaacggggtactggagtgaggttcctcacactgacccattcacatctttggtgagctcaaatctggcttgaagccattctgaggatggccgtggtttgagaaagcagatagctctcaggcttcagccactgccaggcacctgagccctacccccacaatctccacccaatcacctgggaccttcttttcatcatgcaaatgggtcgggcagctcggaagctcaggagtcattggaggcccctgtcctgtcccattcctagttctgctttccctcatggcaaatgattagaacacactcactcaagcaaccaagacatggaagcaatgggaatacatgtcagaacacaacagttgggggttccaagtggagcatccctgggtccctctctccctcaccaccctcactcattccctgatttccatcactgactattagcgaacaggaggacagatgtgtgtcttctcttaggggagtctcttaacctagtacacaagcatcactattatcttttattacttgctgttaagaagtcagttttaggtgttctttatccttccagacaaactaatttcatgcaacactctcaccctctgaagcacttttttaatctacgtcagatgcagtttaagtctttagtacacacagcagttctcaataacacgtggtgaccacaaactgctccgtaaaattgcataatgcttaattcctatcaacttgcataacacacaaaataagttgatatgaaacacattgtacatctgtcaatgagctttggtgacaaaggttatacaaaataagtcaggagagtctatttgtatttttaaagtggaattacatagagtacaacaggagatttgctccagcttttctgacaattagacggttcagttttgaacttcgtatactatgacactaaatctatcatgaacaattttgttgtgtacattatcataacatgattactcatgagtgtaaaactagttgcaattttagaaaattgagacaatttcttctcagtgatttttttgtatcgataaagtcactagctgatatggtttggctgtgtccccacccaaatctcccagaattcccagatgttgtgggaggggcgcaaggggaggtaattgaatcatgggggccggtctttcccgtgctattctcgtgatagtgaataagtctcacaagatctgatgggtttatcaggggtttccgcttttgctttttcctcatttttctcttgctgctttcgtgtaagaaatgcctttcgcctctcgccatgattctgaggcctctccagccatgtggaactgtaagtccaatccaacctctttttcttcccagtctggggtatgtctttatcagcagcgtgaaaacagactgatacactagcataacagtacatcagtgcaaataaaagcaatatcttaagttctcttttgtatcctaaaatagtaaatcattatgttaggattatggatgacctgatgcaatttaaacgggtgaaaattccactgcagatataatgcaccagcaattattaggaatgcatgtgaccaggtatccagcacttagcacccacatgaccttgggcaagtcataaccacttgattaaggcttcaattttcttatttaataactgaagctgttgaggtggatgacctcaaatatactaaacacaggatcttccagtgaagaacttgggttattcatcttcatctctattctttggggtagcgactaattgattgattaaggggaaacctcttgggaatttacttctctttgataaactcttatgcacacacttcttgcttctcttcagcagcactgcagcaagaggtgtgcctttctgggatgggttctgttacctttgcatcctatatctaccttgtatgggtggagaactatagtctacacagcagcgttctggggcctgcctccacatcaaatacactttgatgatggagcttcaaaactattgccatcatctgggtgccatctcagacccagtgaatcagaatctcaggggacagggagaccaccatggcactggcaggtatatttgaaactccccaggtagttgcaatggacttccaggatagcgggcttgacattatggccatcaagtgaatgatgaaggcattccgaaatcttcatcttatcagacatctctgggaaagcacatttttaaaatgaacctctggccaggcacagtggctcaaacatgtaatcccagtgctttgggaggccaaggtggaaggagttcgagagcaatatgagaaacatggcaaaaccccatctatacaaaaaaatttcaaaattaggcacagtgggccgggcgcggtggctcacgcctgtaatcccagcactttgggaggccgaggcgggcggatcacgaggtcaggagatcgagaccatcctggctaacacggtgaaaccccgtctctactaaaaatacaaaaaattagccggcgtggtagcgggcgcctgtagtcccagctactcgggaggctgaggcaggagaatggcgtgaacccgggaggcggagcttgcagtgagccgagatcgcgccactgcactccagcctgggcgacagagtgagactccgtctcaaaaaaaaaaaaaaaaaaaaaaattaggcacagtgatgcacagctgtggtcctagctactcagaaggctgaggcaggaggatagcttgagtccatgagctcaaggatgcagtgagcaactgtgatcgtgccactacactcagcctaggcaatagagcaagaccctgtctctatttttaaaaaaaacttcctactcccaaaacagctggagtctactccttccattgctagtgtcattcttcacgcagttacaaggtcctggatactgggaatcccttcctcattttgtccccttgtcctggaatgtccttcccatccttaccgtagcagatgtcattcatttggatctaccatttaaaaagcacttacatgtgtatttcccctggggataaacatgcatgtaagtgctttgtaaacgcccaccagtcaccttgcgcagcggtgacaaggtagaaactccaagtttgcacaactagaaagcgagtcaagactcaaacccaggccttggggctttccctgcatggccagcttaccaccctcccttattcaaggtctttttctgggtacctccctgccagccctgtgcctaatttaattcctgccctccggcaccccttcccacctctgtgacggcacttacttctcctaacttcattatccacgaacgggaactgtctgcatcttttgcttcccttttacacatcagctccttcaggcaaccttagttccccttgactttgtttacaacagtgactcaaaaagaatcagatctttgaaccctgaccctcacttgccccattgctaaatagttaccacaggccatgttgactccccacagctcccgtgaacaccccgttttgtctatttccagggccagtttgcctcgttcaaggttttataacctcacacctggccactgaggctgtctcctaactgcccacctggtcactggtatctgcctgcaccaagtccccctgcacctgcgctacagcaaacaccatcatacagtcttagaaaccttcaggaatgcctcctgcctgctgagtagattgcagatgtacttgctgggtgtcacaggatgagaattagaaaactagagcatacttctttgtttttgccttgcagaaggcaagctcttcaccagggacaagctttgatgtccgcctacctgcctgggagagaaggggagattaggatttgttacagaagaaattcaaggtgcaaagtaggattatggagcagaacaggagctgtatttctttaaggctgtgcactcagcactgcactggcctggagcatccactcagggagtgtgctgacagtgtacacaaaaagagaatcctgtgtgccattaagatgtagctggagagtttgaattcaggaaggggaaagaataacacaggggaaagcctgctctttctgaagcccatgaattgtggggagagataaaggaaggagttataaaaatgtctaggtccctactgccttctctggcttctgcccagagccggggaccaggtcaggccaaagctcagggcagagggagtttttgcacccagtccctaatgaggaccatggaagctcttgcactccagaacctatggtggcggaggggtcctgggtcttcctctgcggtgtagattctgagtggagattcgaggcatctgctgcagtgaggtaaggtcacagtgaaccttggaaatcaacctttggtcttgtgggctgggtaaagggtgtggctgagcctggtgttaaacagctggcaggccctgagggaaggccaagtggccaagagatgccaaggaaggccctggacaatgagttcccccagccacgggcttcagccatgtagaccagcccagcaagaggaacccagaggataagggactttccccagaaacccaaagacattgtgtctgagtacctccattcttccagaagacccgtgctactccaagtgtggatcaggaacggtctgtgaaatttgttaccggtctcaacaagataagtccagaaactgagggtaagcatgtagaaacgtctatagctatctgaccgagtattttcatgtctgttcaacctaataaaacttgagcttggattttgtgtgtcttttttattttgttttttctagtaacttatttttctcatacttcacaaaatatccattagcaccatactgaacattttaaaacaaacaaacaaacaaacaaattggttttttatcgtggaacgtttgagaagcgctgcggtaaaccacagcaagcccacaggccccaacaccatcttagaaagagactcaagcaaagagttacagagcattttatccaagggagacctggccctgcctagagactgtttactggatcagacttaaagcgcttaccaggtctggtaataaagctaacatttttcctgctaaccagcaggtggggcacaggaggaagctcagattgactaaaacaatgactctttctctgcacacacaagttgtggtgtgaattaagatttgtaactcctatatgtgggtatctgggtctgccacaatctgggtccaggttttctttctaattaaacgcccatcactttcttacatgaatctccataggcccagaattctctcccgaatcctttctgaccatgcacaacctaccattcttatgtttgccccatctggcacagcatcagaaagatactccatcttaacaaatctctattgatttcttggcctttggtatcacattctgagcctcaggcaacagtgtttgtgacccatctcacttcctagtacctacctatgaccaacataattgactctcaccctagatcccactggtccacctctctgagttcacccacagttgcagtggaccattcactcacatactgacaggttcttggcatgagcatctctggcttctctgaaacaggctttcgctggggccactgaagcttgttcagcctttgtgcaaagcatcccagaagggctgaggatgggctacccaactctcgacccataagggagagcagttggtgaatcaatgccccagctcctcactccccagaggcacaactctgaagttcattccacaggattcctcggaggcttcccatgcaatcaggcctcgactgtccactgaagcagtaatgagcttctcttaattggccagcctcccttgttcctgttctccactccctcacttttgcttcctggggtcactttctaggtgaactacctgaacccagagtcttgtctcaagtcttctttaaatggaaaccaaaaaaaggcaccatcccaatgggctttttgttgtctatgtttgcccagactcttattcttccagcattggtgcagaaccaaactggcttccaggtggaaggcgcccgtggacctgatccaggaggagaccaacagccaggtgatatggccaagaagagctagaagcacatctctgtggagaaatgagccttgagtgattcagaggcctcatcctcttgcaacctgactgatgaagcagctagtgtcaaagaagatggcaactctgtcacttttgcctaaaaatacccaaagctccctgtgatccaagaggccctcatctttccagctgtcaccaccagcacaaacaggagacagccctaaccccttacacaccacctgatttttttcactcctttgtagctccttagtaatcactttaaccaaggaggcagaggaaaagatggtacaaagaaatacagaaaagtcaggatacaatacagatgatgtaactctgcctcacccattggtgactataactgccagaagactgagggtgttggggaaagcgagtccccacccaggactgagcacaactcccaaggcacgcggccccaccgagtactgagcctgtaggtgcacatccgtctgtctgcgaaggtcggagagaaagggaaagaaagcactgcaaataggagtgttcagtatttctcatgcagcctctcgcacaagcagggtgcactctgttcctgagctatttcacacgctcttccattatggaactcagcacacaatcttgatgatgttggtctctgtctcctgccagcccgtgtgtttcttgatggcaggtttgtcttatttatcttagtactctcagagcctggcacatgggagatattgaataaatgtttttcaaattaggttgcaataaattaaattgggtctactttggctcagatgaaaatacactggagataaaaacaaagcgtagtgcagtttgtatgagttgttctgtctctctctctctatatgtatatatatttatatttagttgtaagaaatataaatataaatttatatgtacacacacacttccttctgaattggtctgagttgaggcaaaccaatgtgtgttcattccattaatcagtcaggtccagtgttctgttcatttataactatattcaataaaggattctaaatcatcatcatagaaagacaaccccagaactcagggccttgcagcccaattccaaagaaaagaaaatgtgaactttttctccaaagtgttaaactgtaaggagtggtttcccctgtgtgttacttctgggcccacaattgagtgccaaattgctaatgaataggtagaccgtgttgtccatttacccttggcaattacgattaaagttacatactttttatgatatcctccccagcccccagaataagccatgacagccacacctttccccctgaaatatccccttcatttttcacccgctctgtggctattcctgggactgagccccttttcatgagttccagcgggtccccatcaacccccaaatcccaccacaggccacatcgtcccagaccagaccacgtctgttgagctagctgtctgtttctatgtgagtctatcaccaaagtaagttacattctttcactaccaaagttactgggcctttttttttttttaacaatccttggaaatgatcccagcttaaaaaagaacgaaactctcaacagtcagccaaatacaactgttgaataatttaaatgagagctactaagtcttttgaaaacaaccccaaccctgtgttctctgatgtgaacaggaaaaaaaaaaattatgcaccaatgtgcagaatttgagcctatgcagatggcatgttttgcaccgtagactgctgttactgttttggccaacgcgttcctatgggatgctgagttttgtttgtggattgatctctaagttactttatagttgaatctatcatcatattttcctgggattttatttctcttcattttaaacagatacatcagagacggagcaaggagcttaggctagcaagcagccaacctcctctgttagaccaaaatgttccctcactttcagaataatctgtgaatgttgtttgaaatgaaaagaaagagtaaagcatttagatagttcctaaagaaaaataaagcttaatcaagccactgtagagacatctcctttcttctggggccatgaccaatagcactgtatagagaatcacataaatagacaaactgctttcccgtccatttgggacaccttagacagacagaaaggagagagtccagagacctttactaagcacccatgacgtatgatgcgctgtgcctgggataaactgtgatttccaggagcttctattcttcttctactcttacgagcacctacacaagaagctacaaaaagattttgtaagctaagggaaagtaggtacagaaatagagcgaattactattaacaagtttagctgcaagaacaatttttttctgacgttgggcaccgaggtgaccttcttgtaagtggttcaaacttggatttattgtcattgtgttctcatcattctactataagtggatcaggcaccaccgacacaagcacacattcatttatgcattcagcacacacgtatggtgcacctagtgtatgcatcatgccaggaactgaggaagagaagatgatgaggacttctgtcctccagaaactcatgatctgctgggggagacgagtatgcaaatgtatcctttaagagaactgtcagaagtgcaatgagagagagaaactgtccgttcacaagactcactccttcatacctggatgcaatacagatggaggtaagatttaggactttctgcagagccactgcattttaagtagactcaaactgcatctttctaggaagcgaggcagtatttatctgtccaagcaaaaattgaatgaagcacatgacttccatggatgcaaacattataaacaaggtctctgtgtgaatttgcaggattgaatctcccagattacagttgaaccctaccacctagaaatactatgattcttatcagacaaaatcaagacatacaaatttaagttggaacaaaagaataaaatgtagttgactcactttatttagcacagatttggatttttgttgttgtgtatatcaattcaagaactaagaattcaacccaagttttaaaatgtaaaactgacttcacgtatctttagtaaaaggccagcaacacctcccaaagagttcataatgtttttaggaataaagtgccaggggttgactaagactattaagaaaattgggtataaattcgaaagaaattgtgtgtgggtccctcccagaccatcttagcccatagaggtctcttatttccttgagattatttcaaggcatcagaaatctccttctcacgttacctaccctgccccataagccaacatttcattctctctttgcatgaatcatttctcgcctgtaaagaatctcttgccgttgttttttgttttgttttgttttgttttgttttgttttgttttgttttgtttctgagacagagtctcactctatagcccaggctggagtgcagtggcacaatctcggctcactgcaacatctgcctcctgggttcaagtgattctcctgcctcacctcctgagtcactgggactacaggcacatgctaccacgcctggctaattttttgtatttttagtagagatggggtttcaccattttagccagtatggtctcgatctcctgacctcatgatactcttgcctcggcctcccaaagtgctgggattacaagcgtgagccaccatgcccggccttggttttgcttagactgaagacttttcaaaatcatgagtcagttctccctcttctcttttcattcctcaaattctctgaaactctattaaatataggaatttaaaaatggctgttgaatcagttgtttcagctctattgttgctaagccacctttgaaacaattaagacaccatcaatttttctgcagtttatatagtaccagtgtacaaagtagatactcaggaaaaggtatgggtaaattaactgattctgaagaattgagaatttgtccctgagttatataagaatgattgtgtatatttttagttgaaagcatgtaatagcccctaaagagcttataacgcaaacgacaactaggttctcaggttttaaatctctggttaacaggctcatgggtactactttgcgggacatattttaaaatagagtggggtgggggggaatgtacacaagtattatttgaattctattatcatttacttatttaaaacttatttttgtatttcatgtttactacttttgtttgctttgctttgatagaaactaaaacccatcttctctgacaaagtactgtttttgatattcaataaacagagctttcttattcatccttttctttaaaaattactttcctgtattacaatttgtatttgttaatcacgtatggaatcagcttttaaacagaagaaaacaagcatcagctctgtagaaactgcagacgttttggagaagattaaacaagacagcttcaaaagaccaaaacatgaatccaccccagcccttgttggtcaaaccacgtgggccttcagctgtctcgtctttccagagtctcatcttatgatgaaagttaaataaattccgttgtaaatgatgttttttaaaactctaaatgagagaagcaatagagactttaccccctaataatgggatactatatgtaattcttaaaattaataaaggccatttgtgctgtaagaattctccattttcttttgtaaaggtgacttctttaacctgaatattttaacaggtcaataagatatgcccctggtagtagagtgacattttttttcactcctcaaaagccattttataagacaatgcacatttcaacatcagcgtaaataacagccttgtttgaaaactcaggaggcagctttactctttctctgccttctttcctacccagccctccccctcctctgaactgaaccacacctctctagaaatactcgcgttcttaatgaaaaccatatttaaaaaaaaaaaaaaaaaaaaaaagtttgcatgacccgccgaaacgcctggacaatctttaatgtcagcttcagacgacacgtgtcttatgaaagtctggggccctgctcgtctggcagagcgagctctgtcccacatctttatgagaaagagggacaaaacttctgtttttggcattttatgttggagtctgttttaagcaaggaggaaaaaaatagcaaagtagagtctagacagaaaagatgggggtgaaatctggaagccattcaccccggcaagggcagcagcagcccgtcggcagcagggatcgccttacgctgcctaattacacatgaaaaatgtacacaccgcgtctctcaactgcttggaaaaatagatgctaggatggcgcttttggacggtggcaaccgaaccagttgtatattctggatgcgggatctcttactccacgcattttgcaatgtgatttcctttttcaggggcataggtattcctttcatcctccccccaagatgttttaaatgtattctcaatttggcaaatggtcacattctgtgaagaatatttagatattaaagtaggttccgtatgagatcaagttagacacatttctatggtaaagagtttgcctaagagtaagatcaagactatgaagtcctcaacatattttaggatctcactgatggcttgaggtgatttgcagttacaaggataacttctaaatcattagcatggcctgctcatgcaatcacagacttcgtgccaagcataggtctacattttatgcaggataatgattttttaagaatcctttaatatagtgtctttttccaggagttcaaagcatttttcacagatattagcattcagtcacataacattcctggaatctaaggagggacgaggccgtagccaggagctgactgcagaggaggtgtgtgtgcaggctttgatgctggagagattctcctgaagaaaaaatggtaggagagaaatttagaacccaaccttaatggatgttagagagcacagctagctgtgtgggtgacagagagactgacagacagacttggagaggtaggtagaggtcagggaaagcctgggatagagaaactgtccaacagaagctcaaagcaagtaaaagaggaggccagggagctatttggggccctgaaaaggggtcatctatggaaggtttgggaacatcaggataccaggaaggctggatgccatgagtggtgaagtcaatgggatcagctcctatgggctctgggtaaacactgggaaggagccaggagctgtgggcagagtgggtgacatggcctggctcaacttgggggaggctccctggccaggagagcagagactgtgggggctctaaggggagacttagggagagactgttgttctgctagcaatagatggtgatggtttggaccagaaagaggaagaatctagaaatacttccctaaggctgattgaaggctgactctatcatcctgccaggggcccagggggaattgcagtaggtacagcaaacatcaaagacaagggcctccttctgacatgaaacatctatgtgcccttcagtgaggattattaagcgcagcggggcaatcccaccaaagaccaccaaagaaccacaccaaagaccactaagcagccactaaaaatgatatcttggggtggtaactgcagcaggtgtacacttcagtcaaaatacctcaaattgtgcatacacttaatctctggccagtttattctatacagaacatgctttaataataaatagtaaattaattatttaaccaacgtaaggctaggataagcctcgtacgtgcctctgaatgtccctggggctgtacttctgattgaaaccacaatagcaatagctaatattttcctcatgttgccaatgtgaccagaattcttctaagcattttgcatagattaattcagttaacagttccagcaatgctatcagatagatactattattatctccatttcgcttgggaagaaacggagtcacagaaagttcgcgagctttggccgaaatgtctcatcagtgggagcctgaggttatctgcagcctccttccctcacagggcaactctaagaaccaaggagaggcaggcaccaaagggctctgaaaagtgcaaggatcggcctggcgcggtggcgcacgcctgtaatcccagcactttgggaggccgaggcgggcagatcacgaggtcaagagatcgagatcattctggctaacacggtgaaacccatctctactaaaaaaaaacacaaaaaattagccagtcctggtggcaggcgcctgtatcccagctactcgggaggctgaggcagaagaattgcttgaacccgggaggcagagcttgcagtgagccgagatcgcgccactgcactccagcatgggcgacagaggcagactccgtctcaaaaacaaacaaaaaagcaaaacaaaacaaaacaaaaaaaagtgcaaggatccatatctgaccaaaatgcttccagtttctccacggagataaggaatagcttgtctgtggtaggaatctggggaagattctagtgaccacaccagtttccctccaggaaacaaataattactttaattaccctttccagagccctgttttccatcctcgtaatcattacttttgctcttttctgaattctctccaattttcttacacctctctaaaaatttgtggacactattgacctacaaagaaagtttgaaatcgttgacaagaaagacgtttgcaggaagaccttgcaatagacgggtcaggtttacagaagattttgatatctgggagttatacatgagttactaaaaccctggcttctgtcccaaacttaggtcccaggtgtttaagtcaccagtgaggaactgtttttgttactggctggaggtctggtggtgtggggaggtgggtctgtggcagtgatattgaggttacgacccacagtgattatcagagcttattgacccttgaagcctccgggagtgctcaagtcctcccagcctcatatcccagcacagagccctctctggaagtaagagctggcaggtttggttctggggaggtaactgtcttaggactacacggtgtcatttcagaggcccattgccccctctatcaggcacaggaagaccccaaagaaaaccttgcttccaccatgaagctgtgcaactttacacaaattccctaagctctctggactttactctcctcatttgtaaaatggagctagcaatatcttcctcatagggtttccgaagatcagaggtgatagcaggtaagatgcctggcgtggagtagcctttgtgacaatggggaaaatttgacaccccaagtaccagcccttgggttgacattccaagcctttcccacaaacaggttcttactcaaggtttgaagattcactagaacatttacaaaggaaagggaaggggaggggaaggggagggggaggggagggggaggggagggggagggcaggggagggggaagggaggggaatggggaggagaggggagggggaggggatggggagggggaggggaggggagggggagggggaggggaggggaggggagaagtggagggcttccaagggcccacatcaaccatgcaggaatttctacttttaaaattctgggtaaaattgtattcccccatttcccaggctggggtgtggaggtacccagggaagggtcacagccagcctgtgggactttgaatgctgttccatctcccagatatcatattgagtgaagggcaccaaagaccttccagagctggtacacattaatgagatcacattggagaaaacatgaggcaaagctcaagatcatcatagttgttcttgtctgggcatactaccatctaacggaaggaagcatagtctatgaccaagaccaggtaaaacagttaaacaactgtgaaggggctactgaaattggaccgagcatacaaagaaccaccagtgggaatctatgccaccaacaacaacccctaatatctccccaaaagaagaattgaggaaagtgtctctcttgtagttagagtccatttttattaactgtccatataaatgtcagactaaagaattgtgcttataaaatgaaccttaggtatgaccccagaattcaaaaatgcataccctttgtgaccagcagagacacatcttcatttgggttaaacactggcagaaatagaaaccaagagacgggctagaccctcagtggatgaccttgagccatgactttgctaagtctttgcttgcccggtatggttgttagatgacctgattgacaaggtctgctctagtgatgtcctaccaggactcccaagtataactttttctattattgctgtttctcagcggtcagtgggtgtaagagaagctaaccagaggaagtgaatcacttcctgtggtcattcttctgcccacagttgagctatttttaacagtccatataaaaatcataaatccaaccctgggcgtgtgttttatttaacaagtgcctaataagttaggtggaggtggagacaaaaatgggaagacttgagccagtgaggaggaaaccattaaataaattcccccagataatgataatctctgtagcttcttttggaaaacttgtcacaaagaacaagaataatgtttttagggtcacttctatggaagttcccattccatatggaagaaactaatttataaagcaaaagagctgcccaactttcacagtgtctgtagtaaattactcaaaatattccagcaaccagccagggtgatttttcaaaaatctttctcttctttatcactgctatttctttccattcgaatatggtggtatcatttatacaaaatctgtgaataattagacaaggaatgtgaaatgatttactaagaaatgcttggagattaagtacaatctcactccagcattgaatgaaggagagtaacagcttgggcatccatttcaaaggaccacagactgggcagcttaaaacaacagaaatttatgttctcacagttctggaggctggaagtccgagatcaagttgtgggcagacttggtttcttctaagaactgtgaagatagatgctgctccagacctctctccttggctgtagatgttcattttctctctgtgtctccacgtggcatcttcctcctatgactgtctctgtgtccaaattttctcttcctttaaggacaccagtcatattggactagtgcccactctgatgacctcattttagcttaactgcctctgtaaagaccctatctccaaattgggtcacattctgaggcaatggagattaggacttcaacatgtgaatttgaagtggggattgctgggggagacacaattggcccataacaacaaaagagtttcttttattgcatcgtgactttatcacatatcaggctttcatagtattaaatatctacctaacacctctagtctgccttccactcatatcccccgtgtagatgtagcccacccagagagagaaaacccaacataaattctgaacaggatgctgctccctggacctgcccgctggaggcaccatttttgagagaacttctggtctaggtgctcttcctaacaacatctcagatgcttctaacactagagttcagacagatcacagacaacactcagagggctatttataatttaatatacacaacatatgataaaatgaattgtttcaccattttataatatgttgagatgtctgcagctcttctcatcaatggtttaaagcaggagtctgccaacctcttgatatggtttgaatctgtgtctctgccgaaatcttgttgaattgcaattctcaatgttggaggtgagacctggtgagaggtcattggatcatgggggcagattttcccctttggtgctattctcatgattgcattctcataggatctgattgcttaaaagtgtgtagcacctccccccttctctcgatcctgctcctgccgtgtaagacaagcctgtttccccttcaccttctgccatgattgttagtttcctgaggcctccccagaagccaagcagatgctggaaccatgctttctgtacagcctgccgaaccatgagccaattaaacctcttttctttataaattcccaggtctcaggtatttctttatagcagtgcaagaacggactaataaacctctaggaaagggccagacagtagatatttgagggtttgcagtacattcagcctctccgaaacttctgaactctgccgttgtaacatgaaagcagccttaggcaacacatgcatgaatgatcgtggctgtgttccagtaaactttatttgtggacactgaaatttgacttctatgtatttttcatatgtcacaaaatattctgcatctgattattttccaaccatttaaaagtgtaaaactgaaatattcctaatatgattcttttccaaccatttaaatgtgtaaaaccattcttagttcataggccactgaaaaacatggtggttggattttgccaatgccttaggtttgctgagctttgtccctgtttgttcctggtgagccatcatctgcacactatgcctgtttcttccttgaaggccctaatttatccctttccatccatactactcagctctcccaacacagccttgaatccttctctactgatttccacaagaggccttgatcctaatccactgtaccagataataactgcatgccagatagggaggctccaccacaatctttccaacaggagctttccaagtctttgcttccctttatcagtgccttttttaggatcaagattgctttgcttcctctagccagtggggtggtggtgagaaccaaaacttctggtggtggtcagggtaattttttacattgagaggagctaagaacagctttcctattgagcaaaaacatcaacaccatgatgcttcctactaaacattctccatcccctctctccctcctcctccctcccttaagcagcaacccttgcattcctctttggccatttcatgctcaatatcaccttgcttatttgccatcttagtagagcactgggcagtactcagtaaatcctccctaaacattggccaagtgctgaaaacccctgggatgatgggatttctgtactgcaaaaacatttcttgaacatgaagttcccctctactatgtgtttcaggtaaatccaatcctccaaatgaaggaaaacaactacgaaaatattttaggcatgaaatcatggtacaggtttggatgccaggaactctgttactggtgacatatttttcatccgagtaattaattaatcaacaattggtgatatggtttggctctgtgtccccacccaaatctcatctcaaattgtaatccccatgtgtcacgggagggacccagggggagctgatgggactatgggggtgatttcccccatgctgttcttgcgagagtgagagagtctcctgagctctgatagtttaaaagcagcagtttttcctgtgcttgcacttctcttccctgccggcttatgaagaaagtgcctgcttcccctttgccttccgccatgattgtagcttttctgaggcctccccagccatgcagaactgtgagtcaatgaaacctctttcttttataaattatccagtctgtggtatttctttataacagtgtgaaacggaccaatacaatggggtatatgcaccctgagtgagtatacatcagagggtgttcacctttcagaggaggtaggaagttttgtgaaactcatttttcagagaattttaactctaatagcattaaaaaatgtaatgtggatgccaaaattggcattgtcccagtcactgcaaatcaaggtactaattaatgttttcatcattctcctatgcttacccgtatttgaaaaatgaagacgtctacatgggatgtttttcccaaggatcaagtaccaagactaaacaaagattcactgcctgattgagtttagacccggcaagcacaagaccattgcttcatctccaccttggattgcaaaatctttcaggaccagggctgttggctgaataacttgctccatggtaccaggatctgcaactcttggtgcagattgtggatggaggtgagtggtgagacagggtggcagctatccttgcacctgaaagaagtttggtgactctctggggcaggtatgcttcgaagggagcaagctcttccagctgcagggggaccctgcacagcagagtcctcagcaaaccttggcattgcttgtgggcagcctcgcagctcagcggtgtgctcatgccagctcctctagatgatgctgtaattggatagcaactttcttcactaggtcacaggttcaagagcagcccagacccttcagatgttgctttgtcctccctctcccagcctgcacagcatcaagctactcctggggcctgcctgtcctctcttctgccccttacacaagctgggagctgagctgaagcagagctggttttaaagctctgacctccatgaggcaaggaccacaaaaaccctggaccacaaaaagctaggctgcagagacaggaacaaaagcaagggatggcaggaagctgattgacatgtgggaatccaacaatgccccagtcttccaggcggtgtgggtcatctcagccagcagcactcctcaaatgagaatgagacaggtcaccatgggtcacagagcctctctaccaaagaaggagaaaaagatcaaggggggcttttgtaaaaagggaacatatggactggcaaaataaatcagagctggccatggggtaagatcttcttatccgaagaccgtagtcatcgttcctgtcaccttggctctagaataaagcccacaccctcatccctgacttctgtagactaatttaaaaagattaagtaacgttccttgttgtcgctatcaggatgtgaacttggggtgcagccaccccagaagggctgtgcggaatggtattgctctaattcaaaggacgagaagggaattttggttttcatgaattacatcatagggattttttttgtttgctgttgtttttgttgttgttgttttgccaagaaaacatcctgagttccctggtcctgaatctgacctcattaggggtagaggttggagctacgtccctggcaacaccaccctcccacctggagcagcagtgctgcagtgaagaggagtttctcatggtttagggataaaatgaactgaagagttctcaccatggctgcctaggcagctgacggggccacggtaactgactctggatcccacgttccagctgaacaccaagttatgtcttagtccacatgggtggccattgaaagcaccacagactaggcagcttaaacaacagacatttatcttctcacagttctgaaggctggaagtccaagattaagtttccggcagggttgggttcccagccagggctctctggctgtgttctcacttggcagaaagatggtggggaggggggacagtgagccctagtatctcttttttaaaggccacatatcctttatcagatcagaactctacccttatcacctcatctaaccttaatgacttttggctgggcgcggtggctcatgcctgtaatcccagcactttgggaggctgaggcgggagaatcacttgaggtcaggagtttgagaccagcctggccaacatgctgaaaccccatctctactaaaaatacaaaaattagctgggcatggaggcgcgtgcctgtaaccccagctactcaggaggctaaggaacaagaatcacttgaacctgagaggcagaggtttcagtgagccaagatcgtgccactgcactccagcctgggggacagaatgagactccatctcaaaataaataaataaataaataaataaataaataaccttaataacttccttagaggccccatctccaagtaccaccacgctaagggttagggcttcagcataagaattttggagaaacgtgaactttggctgttgaatgcagcccccatgctcactcctgacttccttagactaaccaaaaaacttaatagtattcaacattattgctaccagagtactaaactgcctaggatgagaacttggggtgtggctccccaagtccataacagatatgtgacaaaagcaccctcctggatcactttcactattcattcattcacgcgattgttccttgacttaatacttatccactggagtgaccgaaggccaggtgtgctcccagaggcagggataacagtggtgagcaaggagccaccatgctcagggagaagtcagacaaataaaatggaaagacagaagaaaatagaatgtggcacttcccaccataagaacaagttggttttcatttgtgcacaacttcacattctttttagagatggggtctcactacattgcccaggttggtctcaaattcctggcttcaagtgatcctcccacctcagcctcctgagtagttaggattacacacgtttgccactgtccccagctaccttggttttgacataatctggcctgtagcagctcccttttcccgttccttctttaagcttttccaaacagatgaatatctttcaattttcagaaaagtaatatcctcaaactcttcagagtactcctcccttatctgcagaatttaaacaatacctcttgcttctgtgtgttgttcatggcatgtcataacagccacaagtacctgagctggatttgaacagaaaagtgaggatgattgtaaaatgaaaaagtatcaagatatttattctccgaggccaggtactacgactcacacttgtaatcccagaactttcagaggctgaggcaggaggatcgcttgaggccaggagtgtgagaccaacatagcaagacctcatctctacagaatattttaaaattagccaggcattgtggtgtgtgtctgtagtccttactacttgggaggctgaggcgggaggatcatttgagcccaggagtttgaggctgcagtgaactatgattgcaccactgcagtccagcctaggcaacaaggggagagaccctgtcccttgaaaaaaaaagggtatttattttttggataattgtaaattatcaaagaggtcattgtttctttctcctttaatatcattttaatcggtggatctccacttttcctccccagatttcttgctctgaaaatgaaaagtggcaaaagtagaggaaaagacactggtgggtagagtcatgacaaatttgacatttctaaactgggcttgacagtggaactttgaaaatatttatctatcagaaaatagtttcagccatgggcaatttggtaaaaggtttagttgatggaaaaaccgtaactcagtgtgactggctttaatgtaagatgttcttgaaggccacagaatcaccagcatttccaacaacctggaaaatttagaccagcttggaaaaataacagggggctggggtcatagccaaaacactgtgcaagattagataaatttatgtgctttagagatttggatttaaatattaaattataaatgaaagcaatgctgaggctgtgtttaaacagggctctctgcctatgttctggtctcttttgcctccaaaagattggaataactttccaaaataaggtgtgtgctgcatctatatatagttgtttcccatttgcatttctcgtaaaagtatgtgctcctatggctcctttaagtagttaaaaaggactctgccctgtgggtgctggcctgtgtctcagtacttttgtgtgccttccaagcccaagacaatgacttctctaagaggcagcactgctcatctgaggtccttcctcctgccaccctggctggtctagagtttcagcctctgcacaggcaatgggctagtccacttgaagtgctgggtccattctgcctttttcacctgccatggccctaaaacgactctcttcttgaattgtctggtgaacataatcagattttctccaattttgtttctgttttcataccaaaaatgaagaaagcaactgtgttagtccgttctcacactgctataaggacgtatccaggactgggtaatttataaaggaaagaggtttaatggactcacaattccacatggctggggaggcctcacaatcatggtggaaggtgaagtaggagcaaagtcatgtcttacatggcagcaggcaagagagtgtgtgctggggaactgctctttataaaaccatcagatctcatgagacttcttcactatcatgagaacagcacaggaaaacctgcctccatgattcaattacctcccaccgggtccctcccatgacacatggggattatgggagctacaatccaagatgagatttgggtggggacacagccacaccatatcagcaacccccttcctgtagaacaaacaaaccatctgcagaacaaaggaagagtaaacccaaggcttcatcatggtggtcctcccccttgccccttttttcatccctcaaattatacatggagtggcattaaccattaaccactcttaggtttaaaaccctcctccctgttgccctgagagtaatttccaaaaacatagcttggtgtggaagccccgctcatcttcccagttctagagtcccccaatgcccccatctttgctctctgtttctaccatagccaagtaggttctgattctttctaccttcccaggtgttggaacattccaggttggagtgttattcttacaactcttgtcccccatttcagttggccaactcccactcactctgccagggtttcccctaaccatcccccactgttggcttaagtggccccaccatgagctgtcatgccatatcgcagcgctatttttgcacactccaatgtaattgcgtttgtacagctgctccctgttagactcctggagggcaacggctgttttgtgttccctgttgtgtcctcacagccccgcacagtattcagcatatgatatgtgttgaacaaatacttgatgaatggatgaatacaattacaggaaccaatgtttaggttgagccatatgaaatggctgctatttaaccatttttaacctacaaacatggcagtttcatgattctatctaatgaactaactgtcttaggaatactgtgccccagcacaaaagactgcttgaaattacctccaaaagatgtaggggtctaggccccatgaagagaagcttcagataacacaggagaggacaaaggtagaaggaaaagaggattttgtgaaaagaactgaacaggcatttccaatcaattatatgctcagaatttttcctggtctcccaaatattgcccttcagccttgcaaaccatctggaaagttctttcctctggatgaagcatgctcatgccaaatgtgaactctgtactctctgacagtcgcaaggaagactgtcaaatcaggtatcactattgaaaaaaaaaagaaaaatactttttctaaatcagaaaataattcaattttattcagctttcagagaactaaataaccatgagattaaaatgccaaattgtgtatcacactgtaggcttataagtactattattcagaaaaactgggttgtaggaggaaaatgaagcccaaaataagaaacaagaaaaagtgagatggtctaatttgggtggaagttgagaacatgccgttcttgccatgagtaattgagagtttgatggttaaaaagaaaaccgacccggtactcttctcctcctctgtaaggaagaccattaagggcataaatccttatcaaatccaacccctctaactgggattgaggaaaagctgtcttgcataaggagggctgagggtgtctaagcaacaactacagttctccctggtgttaaggtctcaagttaataaaatgaacaattctggaaaatgcaaatagaaaaccaaccccaaaactgtgactgccatgtttgtgcagtggatggaattcttaagtgttgtgcattcgggctgcacagactctgtttcagaaagatgcttccaagaggtgggatctattcaacagaatatcatccacaatgcaggagatgcccagggaatatcattcaaaaataaaccaggaaaatccacaatagccatttatcatgcattcattaagaacttggctctggggtccagagaaacacagatgaagaagccgtaactctggcctccaggattttgcctcttgtgtgggagctgagctgacagaagttcctgatgccaaatgggatgtacagacacaaagcaaggatatgagggggcattcttggttaactgccaggtgtgaggagtgaacctggcatgctgcaagtcaaggaaaggatggcaactgatggaaactgggaaggtctgtaagacatcatgcaagagacaaaagctgatcaatgttcaaaggttatggaaccacttctctgttatgcttttaaaaagcaacttcaaagaggaaaagggaatgggatagtttatgctttgttcctaaaccaaacgatagtaaactctgaaattcaagtccttcaagaaataattatttctctctctgtctcctctttctttccctccttccttccctccctccctcccttccttccttccttcctccttccttcctgccttccttccttccttccttcttccctctcttcctccctcccttctttctttccttctttctttctccctttctctctctgtctctctttctctttgtttatccttctctctcccctcctaaatgagtgaggtaaatttaattgggtctgtgaaatctcataccctttgggttgatatgaagacactaggaaagtacaactttatctgactacaaacatgattatctgttgtgtttttctaaagagtgttttccttttatggataaatttatctcatttacttttattgacatgtttagaattatttctgatgttttatttctttttatgctttctggatttttttaacctttaaattgaagtataacatatatatagaaaaataaacaaatcaaaactgtataacttgaaaaacttttatagagttgaagcatctgaggaaccaccacccagatcaagaaatgaaacatgacttctcacttataaatgggagctaaacatgagtatacatggacataaagatggggataatagacactgagaattgcaaaatgggggagcgtaggaggggagtgagggttgagaaattacctattgagtacaatgttcaatatttggataatgggtagaatagaatctcaatctccatcattagacatgtaatacccaagcaacaaacaagtacatgtacccactgaatctaaagtaaaagtaaaaataaaataaataaaataattttaaaaaaaatggaatatgactgtcatctacaaaccattgagatccttccagtcactaacattcccctggggtaaccaccagcctgatttctaattccatttttgcctatttttgaactttatatacatggaatcatgtagtatatacattttcatgtctagcttcttttgctcaatatcatgtttaagacatttaatcatatagttgcatgcagttgtagtttattcattcttattgctgaatagtattccattgtgtggttataccacaatcaatttacccattccactgttgttatgcatttggatagtttcctcattctcagcaaactatcgcaaggacaaaaaaacaaacaccacatgttctcactcataggtgggaattgaacaatgagaacacatggacacaggaaggggaacatcacacaccggggactgttgtggggtggggggaggggggagggatagcattaggagatatacctaattctaaatgacgagttaatgggtgcagcacaccaacatggcacatgtatacatatgtaactaacctgcacgttgtgcacatgtaccctaaaacttaaagtataataataataaaattaaaaaaaaagaaatagttctactataaacattcttgtacttgtctgtttgtgaacatatgtatgtatttgtgtttggcacctacaaatggaattgccaggtagtcatagggtttgtggattgtcaggtttagtcggttctgccaagtagcttttcaaggcagttgtgaagatttacattcccaccagcaatcagaaagccaatatgattgaaactgtaatgcttcctcagacaataaacatatattgaagaaaccccttctataccaagtcagcatggcctgagagcttaagtattaaacatttttgttgctttcttaggacaaaaataagagttagctacactgtttttaaaaggaaggaggctaggaagaagtgggttctgataagcattaaggactcctttccaagatgaatgaataatgtaaactaaataaaggctgatgaaatggcacaaaataacagttaagaattaccaagatcatgccagagggtggttagagaaccagatgtttccaggaaattatggtccttgttttgaactcagctggccaaaagctgggtaaaattgtacatgtttaactcacaggactatctgacaacaatgtttatcccactttgcaaagaaaaatttcctgagatacatcaggaagaaaatgctgataagattttttaaactcaggggatacgttttttaagaactttctaagttaataatttaatgatttctgcattattttccagcatcattagctttaaaaatgttgaaagaaattgaaagtgaacatccaaactggctggagacttggaaaggtgaaatcttttctaagctgcaggaaaatgcaatggaacttcagtgataaagacacatccttgtaatgatttcccatagattcaaaaagagcaggccaggtgcggtggctcatgtccgttatcccagcacttcaggaggccaaggtgggcggatcacctgaggtcaggagttcaagaccagcctggtcaacatggtgaaaccctgtctctattaaataaaaaaaaaaaagaaagagagagagcatacagtataggcacacaagtctacatacaagggtataaaatatttccagaaagagatacagatcttaccacacttgttctcttcttaaaactcttcggccgggcgtggtggctcatgcctgtggtcccagcactttgggaggccgaggtgggtggatcacgaggtcaggagatcaagaccatcctgactaacatggtgaaaccccatctctactaaaaatacaaaaaattagctgggtgtggtggcgggcgcctgtagtcccagctactcaggaggctgaggcaggagaatggcatgagcctgggaggcagagcttgcagtgagccgagatcatgaactccagcctgggagacagagcaagactccatatcaaaaaaaagaaaggaaaaaaaaaaaaaaaactcttcaggtatttggtcccattgcctaaaatcccagctttttgacattgcattcaaagccatttatgagctagcctttccctctctctctgactctatcctataaccacctgcatttcatctcttccctcttgcatggtttttccagcaacatcaaagtaaagatgcctttactgataaaagaccactcaccagaaatgtttaggagattattccctcgaaggggtgagcaggtgtcctacccaatgactgactgatacaggaacccaaaagcccagcttccatgcactaaggagggacaactccacagtgccccgagtgtccatgtgtgagtaggctgaagtgagacctcagctggaaccacgtctttgcccagcttattctcagccctatttcacatctctcatcactcctcagagactgccctcaataaattacttgcacaaaaatccccatatcaggctcttcttctaggaaacccaatgtaagagaggcatttctcacttaacaaccaaaacaatgctcttgatggacttgtcccctaaattggcctatgatccatccatcctcttcatctccataaatgacatcacttgctccactgcttggtgccaaaacctaggaattgtccttggttcttatctttctctcatgctccagatgcaatctgtcagcaaatcctgctacctttgcctggcacatcctgaatctgactccggctcagcacctcacctcccatctggaccactgaaagagcctccttactcgtgtctgattccctgttcttgttcctctttaatcagttctccacagagctgccagagtgagcctctcaaaatgtaagtagaaaaaagtgcctcctctgctcagaatcctgtagtggctacctattatgcctagaatagaatcacttggcctcttgtgatctcttcagctaagtcttccacctcattgtattaatcagctaaagctaagacatggcaggtaacaagcattccccaagtctcagcagcttgctccaactacatgtcttagggctactccaacacaagagggcaaatgacatccccagaatgttttgcaatccctacccaaagtacaactaactatacgtattggtttcatggtcactataaagacacatttttactttttcattcatcactgttaaatatccattcccttaaaaattcataggtaaaaaatgtttggagagaaaaataaaaataaaatagaacatatcctgtctaaataatattaattaacaaataccatatatgttatctttaaagaaaaacagtaacaatgggcaatggatgtgacttaagaagtgaagactcacagtactgttaaactcaatatgtgtttttaatatttactgactctctaaaaaatgatatgggaagtgtacgaagtatttctcttgtgtcattctcttttatccacttgagaaatgttctccattatggctcttctctttaaagagctgggtgaaatatctctgcaaccaacaaacaacctgcctctactccaggcactgctgtgcctctctttctccttcaagatccaacttaaaagtcaccttctctacgaaatcgtccagccttcaaaagcacccatcctgtttcctctgggtttccatttgattttgccctgttcatcttcttttccttagcaacaagcctaggccctatgcacagactgtgtcaaataaatgttgagtgaatgaaagtattaatgatctagaatgggcacagtggagtgggctgcacaacttcaggcatttcccaaactcctttggagaagaggaaagtttctagaatcacaggtagctcagaatttgctcaaactaatccatcacaaatgagcatgaaaagatgcctctttctgtgctcagcataatttaaaaaatatatatctaattcaacattctgctggtaaaggagcatctaaataaaaaaaagttttgacatctcttgatcaaacatgctattgcctgcttctgtttggagcacacaatgtctatcatgggtgtttctcgggagtcaatgacgatgaacaacaagttaatggcctgatttattcaaacgcgtctctggacaggcactcagtggtggctcacacagaaagttttctccttgggatgaacaagatccactggtccacttgctaggtttccatgcccagacaaataggggaaaaatagagaaatccttccacagttctggaaataaattctgggtgtgcaagggatttggcaaagttaagcattaaacatttggaaagtcaagttttgggaaaaacagacagactgcgtttccatgtactccccataattttaaaccaggaagtacagtgaacaatccaaattagacaaaacactgacactgtagttttgtgaaaattccacagaaatgcatttacaaaattgttctcctttcgtgtgtgtgtgtgtgcacgtgtgcatgcacttgtgtgtgtggtttacaaggcagaccatcgtagatgctggacctcttggcaaatgcaattaaaacagcctggagtaccccacagaggatcatagatgagcctcagagacccctggtgccttgcaaaatgccagttagcatctttataaaggatggctcttggtttaactacagtgcgcctctggcaagccacttatttacgagaattgagtatgacaggggagatttttgttcactggtaaccaaaggtagagagtgctgtattcccccatgccatcaccctaatgagagcacagctgttcaccctcccttggggctacctctgccaccacttgtcagtctagcccacctgtctcgatcacatggaaagtgtcatttgggaagctcggtccacctctgaagctggagctgctgtcagtcaatgctcagaacctcttggcaaagctctggcttaataggaggcttcttcctggggtgttgataaagaatggagtgggtggagtggtgattttctcagcaaagggagcagaccagacacaccaaggtcagagaaagctattcagtgcagctgtggcttcagctgacaagtaggcccaagaggagggactcaaggttgtgaagtctggggaggcaagaccatgacactgaacttcattctataagcaaaggggcactgtaggtggctttttttttttctttttgacatgaggggtgacctgatcagatttgcattctggaaggatcagaggctcaagcgtagagagagaaagagaaagaagcaaggggagcagttgggggaacttctgcaactgtcttgatagatgtgatggtgcctgcttaggacatggcagagctgaggaggaaggaagagatgcacgggaggtggcatcgatgggactgtgcattgatcattacagaagtgtgaagagtgaagagcagtggtctccccaggtctgactgtcgtagagccacatggggactccagaagatggcttcagaataaacaaagcaaccaatttcatttcacccaaggtgcagttgaatgcatctgggcatccagctgtgccctcgctgggaggatctgggtgaagaccagtatgaatcacctgcattgccagcgtgaaaggggctaggaaattagatctatgtttagcaaaatagtaaccaataaaagaataaaaaatcatcttccaatcggaggaatgagaaataatgggtaaacaaaaggttaatgtgtaggtgacttctaaattttttgcttttgcttgcctatgctttctaaaatttccccagtgaacataaattattttctagaaaagaacaatcaatagaaagctatttttaaggggaaagcatgtagacatcagtgaacagggaggcagcaaatgaaagatgaacgtgatgtagtaggtgtgaagggtggggggaagtgcagcgagccctgcagcaagacctgggccatccagccaaggacacacagctccccttctggctttccccggcatcacaacaaagggcttcttcatatggctgctccttttctggaaggttcagccccacatcatgctcacctcctgaaaacacaccctaccaccaccaccttcattcatgtatggcttttatcttttaccaaaatataccagacagtatctgtgcctgtggtggggcagaggggaggagaggtgttccagagaggaaggagagtggcaccctgcacaagccagtcctccacatcctatcctctctcttcaccttcacagcccactaagtattaagatgctgacttcaatttagaaactgagtgtattagtccatttttatgctgctgataaagacatacccaagactgagcaatttacaaaagaaagaggtttaatggactcgcagttccacatgactggggaggcctcacaatcatggtagaaggtaaaagacacatctcacatggcggcagacaaaagaagagagcttgtgcagggaaattcccctttataaaatcaacagatcttgtgagacttattcactatcaggagaacagcacgggaaagctccacccccatgattcaattatctcccactgtgtccctcccacaacacatgaggattatgggagctacagttcaagatgagatttgggtgaggacacagccaaaccatatcactgagattcagctgtatcaaagaacttgctccaaacccctagagacagtaggtagcaggaccaggacatctagtgctgcctcccaggctgaaaagcccctggggaaaaacagagtgattctgaatgtgcattcaggagtaggaccgcctggttcatatccagccccaccactaagagctgtatgactcagggaaagatggttgccagcccaccatctgtggtaggttcttaatgagcatttgagtgagagagttcatggttggtgcttagaccatgccaggtgcaatatacgtgctcaatacatgttttcagtggttgttttcttttcagcactccactctgcccctccagctactccagagcctcactgtgaagacacccccttctttggcacctcactgactagtcttcagataggctccaagatggcggatcctctatggtaaagaggatgttgagaagatatcagctgtaaagatctgttaaaccaagtcctctactgcattctagttttcctgaccatccaagaatatctctgagtactgtaattcctgttctcagagctgtaggaaacattcaatttgattcttttcaccaggtgttgataaagtcacagtacaagttctgggcagttctagaacttcatggaatctgacaaaactcccagtatgtcactgagtcacttataatttagtcatagacatgataaaactgttagtgaacgaggactgctttgagggaaaggagaaggaaatacaccccaagaaatgaacagaaaaggatgaggcaaggttgtaaaactagaggctggatggctgcaggtggagagggagggagcctcctgctgggaggcagcccctccgaaggcatggaacttccgtttccagctctttccagtggtttgtcagcctacaaacctagcatgatattgatgaattaacttacaacaagaaatataaccatgtggtagctgattaccactgccccctctctgaaggcacaaatacaccaaaagacaaattatcatgaaaaggcaggttagccatcttgaaaccagagccactggagtgagccaagggaatcttatggcgtggtcatccacctaggaccatgatatccctgacactttcctgtgcccgattctgcacgtgacaccatctccctggggtgcgttgtcaaagttttgccatcctatggaacaagatattacatgagaagctttctctggggcatcaagaaagtgatagattttagactacaagtgaattgtaaaacagaccgtaatgcaaacatttaaagtaggtgataaagaactagttagataattcgcccacatcaagggcatacagaggtcaggcttgagaagcagagggttagtgaaaaggatttctttagagaaagaactagttagataattcacccacatcaagggcataaagaggtcaggcttgagaagcagagggttagtgaaaaggatttctttagagaaaactatgagacaccttctgggggtgggtgagggaagtgggtgggtggaagtgtgtgccccccttcatctcaagccaagagactgacttctatagggttgattgtgaccttgctccatgtgccctggattttgggaggcctggtggactatgtttgccacctgagcaaagaacccattgatgaggagctgtgggctgtgggcttgcggcagcagaacaaagagaggagcactggacacagtgggtgtgatgtccacttccaccaagaggtggtgctgtccagggaccaggtgtgggcacgtaggagagagacagtggatcttaaagcctgctcaggggacctcctggaaaggtgctgggaccaccaccaggaaagtctgggagagtagaatttgcacaaccatgggctggagctgagcagcagcagggaagcctgcatcaccaccttggggagggcaggtgagcctatgcagcaggatccacagcgatcccacaaggaactcagctgcaagcacaaggccattgctgtcacttggctgagtgctgctcttcccagggcttggtcacacgtggggcagcacagctgtaagacaaggccaatgcctgagacagacagtagccaccactccagtgtcacttagatctctctaaagacagaaaagtaaggaaagaacccagagttccatcaggcagaaaataattgagagaaggaaacttgctgaaaccttaataggatgccttcaagctacacaaatcagacggaatagttaggtaatggtaaaaactattaaacccaaggggcagctgaagcgtgggacctgaggctccccattttttaaaatgctcagccagtcccagtccagtgttgcaaatagaatcctgcttgtatcagctggggttagttcagagaaacagaagcactaggaagtgatagacgatatgagagatttattttagggacttaactttatgcaattgtgggagctggttagagagtctccgtgaacctgttttctttgtgtctagtgcttatgcttgaagtctgcagggtaggcagtcagattggaagagctaaaaatgatctcctaaatcacctccatacaaaactagaaagaaaaatagtgatgccatcggctaatttgcctgcaggaataggtaaagagagctccatgctaggggtgcttgaggtggtttctgtagatcccccagaaggccactggccccaaaattcttcctggaagtgaaggttgatggggaaaagcatttacattctcatccatcatttccaaaccaataatccattattaacaaaaactcatcatccgtcactaagtagggtcaagaggaatgagttgagggcaaagataattcaggtcaggaagtggagaaagagcttctgataaacctgatggttgtcaaaagcctttcatgtgcctgccatgtttccctggagcctcaaatcaccccactgggcaaaacggccaggccttattatcccctgtttatagataaagaaacagaggcaggtgctgctcagctgggcctcagtgtcctgactcccaggacggcaagaggcaaagaccaggctgacaggtgccagggacaacttcagccactccactccaaactcccctgctcatcagacaataaataagacaggcctcagtgaggtgccttctcttctgtaaggcatccctgacacccctgaacccctccctctgaatccaacctcatgccacacactccccagtctctgtgccaccagcaagatgggtcgatgaatggattcaggttgtaaggagccagaggatttcacaaactagtatcagaatttcagcaggcatctcagtccattcctgctgctataacaaaatacctgacaccaggtaatttataaatcatagaaatgtattcctcacaactctggaggctgggaagtccaagatcaacgtgctggcaggctcagtgtctggtgagggctgctctctgcttccaagatgactcctgttgctgcatcctccagaggggacaaacgttgcgtcctcatgtggtgggaaggacaaatcaccccctctagccctttcataaggtacaaactcattcatgagagcagagctctcaacgcccgatcacctcctaaaggctgaacctcttcttcttgttgcactggggattaagtttcagcaagaattttggagggaacgcaaacattcaaaccatagcagcatcccaggctgaaatcagtagagcaaggccagcccagaaggtgagagatggtttcatctacttccaccctaatctcatagataataaatcatgccgagaattggaggccttaaatacagaagggatcccaacgtggcatctgaggttctcatcacattcacttacagaggaaactcaaaatgcagatgcttggagcacgtgatccaacaggttagggttggctttagactttgcacttttagcaaacacccttacgagactcttaggtagaaagcatcattccaggggaagcatcattatttccatcacatggacaaggaaaggggacccagctggcttaaatggtttgtcccaggctccacagcaatagagctgcacagagaggtcctcctaccctggccccagccttttctccctctcgcacgcctcttgctggtgggaaccatatcacagtcacctgtaacctggcaatagtataaatgaatgaataaatgagtgaatgctttcctgcaggaccacatccaggcgtgttgctgtgtatccatctggggcagaggcgggtaacagaaaacatcaaaaatgagtgagccagaggatttcacaaactagtatcagaatttcagcatgcatctcagtccattcctgtgttgcaggctcatgacgttttgctccttggaaaattgttttgaaagaagaaagcttgtaggtttctgtgttgattttgaaatattcactcttcactaagactctggagggaatagacaaatggcagaagaggagagagttggcatttattttctcaacactctcccttcactgcctgagcaggctcacctacacccagggtgcttcacagctgagagacatcactgggtgcagcttaaatgtttccaactttgcttttgcaatcaagccaaaagacaaacacactttttcactaaattccttccacccaggttgcaaattgaccttattttaatttgaggtgcatgcctcagcccttagacattttacctatctgacagtgagaactgacatgttccttaggcagcccttccgctttggccaatttgactgattaattgaagaactcttcttgatcctcacagaaagatgtctggcagtgtgatattatggtcacattgcttctgcgcttttgcagcacaatgatgtcgtgagcagaacacgtttatcagctggccaggcgctccgggacctgccgcctgccaaacccagcagttacacttcgcagtttccccgattaaaaagtgtctaaacatctgctacttaaacaacacttaaaaagtaataaattaaaaacagggggaatagaacttaaatagagaaagtgagcagagaactaaaaggtctatataaagagagaagccatatattttcgtttctgaaatgatcccttgacaacttaaaagtaagcactaactcaagcgtccagggtataaaataaatctgaataagcttaatgaaaatcaggcagtagtccataaagaaatgcaatatctttgccctcttgcttctaatgggtctgagtttgttttacatggactttcagggatgagagggtccctcagccaggaggagaggagcaatgtcctgaagccaaagctcctccaccatgtgtgacttggccaggctgagcttttcaggaagtggctgagggacattgaaaactgtacacacagaggattcttttattgggtctggtcacttttaaaaagggtttgtcgattttctggcatgtatactacatttttaaagaaacttctctctctctctctctcttttttttttttttttttttttttttgagacagagtcttgctctgtcacccaggctggagagcaggggcgcgatctccactcactgcaagctccactccccgggttcacatcattctcctgcctcagcctctcgagtagctgggactacaggcgcccaccaccacgcgtggctaatatatatatatattttgtatttttagtagagatggtgtttcaccgtgttagccagggtggtctcgatctcctgacctcgtgatccgcccgccttggcctcccaaagtgctgggactacaggcatgagccaccgcgcccggccagaaccttctctcttaatgataggtcataattagcaatgactgtatctttgcagctttacattttgccatttgttttcatccctattaaaaattagaggctggacgtggtggctcatgtctgtaatccaagcacttttggaggctgagacagttggatcagctgaggtcaggagtttgagactagcgtagccaacatggtgaaaccccgtctctactaaaaatacaaaaattagctgggcgtggtggagggcgcctgtaatctcagctacttgggaggctgaggcaggagaatcacttgaacccaggaagtggaggctgcagtgagctgagatagcaccactgctctccagtctgggctacagggtgagactgtctcaggaaaaaaaaaaaaaaaaaattagataacaccgtgttgcccatttagctgaaccatctctttcatatacatgctgttatttgagaatattctaactcacaacattcatcacacccgtctcaagaagaaaagttaatttctagaattaaaagttcggccagggcgtcatatgtaaaaggaaagatggaaattcgtgggaacacagcagcttgaatcagttctatcagtttacacaaatgcaattctatgtctcttctgtatcacacacaatttcatctcccaccctcttctcattctccgatgaagatctacacaactttgtactagtagtttattctttgttaacaataattgctttggtacttagctcaaaaatagattttcttttttgcacattgcttatgttacagatgtgggtggagggatttgtataaataagcattcagaatgtgtataatttctactgcttgcagttgttcctcacccttttccggtctggacataacacaagcttctctctttggtctcttttgcaattacagggaactttaactggggctctgattgaatgtgtgtttcacccatgcatggtagaaatcccagcgttgaaacaagagctcagggcttagaattcgctgacctgggtccagctctcactctgcctgacaccagtgagtgaacttcaggaagatagtgttcctttcttttgctaaattttcctttctttccctttcctagaagtaaaaatgggcataataacaacctcacatgactcccaggaccattgtgaagttcaagtgaatgtatgtgtgcattcaatcattcccaggcttttatatgatgactctgtccagtaaattctgtctcacagtaacatatttcaaaataaataaaaagaagggcttataagcaaagacctataaaggtgccctactgttacttgcagaaaagcagtagattccaagaatagagtcttgagccttcagtgttactactcttttaaataacatttgttttttttctaatttacaaataaatacacatttttcctaaaggcaaaattgaaaaagaaaaagaaaaatatcactcaaaacaagaggtaacaattcttaacgtttttattttgttttctaccagtctacatctatgaagatacatgcttttctttcttataaaatttggaccacaacacatgtgaatctttgttcccgttattaactatttcctttggatggttcccaagagtgaaataactccatcaaagagtaataactctttgaaggctcttcataaattcgtcggcatcttttgagaaaatctgtaccaatttaaaatgccataagtagggaatgagaatacttatcttgcagcagcctcccaagcactaaatgtcattatctattcaaaatctttgccaaatttcatttatttgattattattgatgcggaattattttttaaatatctgattagccatttgtgtttcttattttgcacattgtatttgtcaggaaaactttgagccgcaagtaagagaaaatatgacttccaatgatagaaacaaagaattttttaagaagtctgaagaatttggctttaagggttggtccagcagctcagcaatgccaatgacagtttttctgccaatcttatagcctctcacacatgtgggcaaaatggctgctgaagacccagcatctcatccttattcaagccagaaagaagggaggaagaacaaggcagccatatctgcccccacacactcctcacaaagatttctgcttatgttccattgaccagaattatgcaacatgtctaccctagccacaaaagagcctggaaaagattattagtttttccagcctctataatggagatgggcaagagtgaagggggcttgaaaatggatgttgggttactcagcagtcatggtctagtcatttgcacatcttcaccataagtttttttcgtggtgatatttaaaataccagccagcctccctggcagtccctggagaagcattagctattattgaataaataaaactactggtgattatcttagtccatactacataggttgaccacatgagaggcagctggatcacttgcctaagtctgcattttcaaagcagcagtctccatgtgacccatatactgatgggaaaccagtttcttcctcagttcatgacacctaaatgcatttggcatgtttcttcacgaaagccatcatgaaaaatttcttatatttctgcatgtcatacagatgggggaaaatcacatctttattttggttgcactctgtcctctggggccctgaagagtgaataccatacataccacacagcctatatattctattggaccctcccaagctcactctccaaattttatctgaattcatctacaattatacctgatggtacaactgttgaagaagtggaaactcaatttcaactatataaatggatagaaatactttcatattttcctgattatatattacttaattttattaaggctgttctttgaaatacaggcatctttttattttaaaaaaattaaggtaaaatttatcattattttcatggtgaggcagcacagcgtttggggaagaactactatctgggttccaatcccggatttgctgtttcccatggggaaccacggcagttatataacctcagttatgtcttagtatcctcatttgttaaatatggtaatatcaataataccaaaaacatataatttatgagaagattaaataagataacttgcataaagccctagctcagtgcctggtacctgatcaatacttaatattgaatttttgttagcattattagattattgatatgtgtgtgatatatatgtaacatgaggatgatatacattaatatttttatgtagctcattattcttctggatttatttcaatgtatatgggagaatctagttaaatcttttttccaagtacagttaatttttctatcactacttgttgagtaattcattccttccccatcggtttgtggcattttctttcttgtgtatagttctgtttttatatacactagaatctatttgaacacatcttacctgatactatagaatgttacaacagtaacctgtcattttagttgctggtagaatcattcatagtatgccgaagactgcttaaaaatttgtagaaccaaatcaatttggattgttactttaaattataacaaaaaacaatccagagaaattcagaagtcaaatacaataagtgaattatttgtttttaatctaggaggaaaagcattgagagcttagtatgtactaggcacagaactaatagtccacccattacccatgtgcagttatgcccactgtacagttgaagaagtggaaactcagtttcaagtatataattgactgagtcaaagagactgaggtaagagaagctcatcacacagtcacagcagagccgggactcagtcctagcagcccagactctgaagggctctgctaggtgatcccttcactgatctctgcgtatacgaagagtctctaagcataaacaacatggaaaagaataacagagaaatatgtcagcagattggactaaataacaaatatatatatatatatatatatatatatgccattttgcccacatgcgtgagaggctatgagattggcagaaaaactgtcattggtattgttgaaatatatatatatgtgtgtgtcttagaagtaaataacattggccttttggctacaagcaagtgtaaaagcaaatgacaatgtagggaaatatctgttacaataagaaaaaaacttagaaatttatcgtggaaactgatgaaaaaacactaatgacgtcaagggcagaaaccataaaagaaatgattaacagacgtggcttgatagtcatttaagctttttcttatcaagaaataccatacacaaaattgttagcaaaagttaagtaacctggctgggtgcagtggctcacacctgtaattccagcactttgggaggccaaggcgggtggatcacctgaggtcaggagttcgagaccagcctggccaacatggtgaaaccccatctctcctaaaattacaaaattagccaggtgtggcagcacacgcctgtaatcccagctatctgggagactgaggcaggagaatcacttgaatccaggaggtggaggttgcagtgaacagagattgcactgttgcactccggcctgggtaacagagcgagactcagtctcaaaacaaacaaacaaacaaaaaacagttaactaacctgattaaaatgtactccaacaaagataatacacactcagtatcctttttaaataattcttaataaattttgtcaaaacaaaagacaagcaattcaatgtgaatatgaacagaaatgtgtaaaattttttcacagaaagagaaatacaaattgacaattgacatacaaaaaaaagttaaatttcactcacttataatcaaagaaatgcaaacaaggataataatggaatttgttttggtttatccaattggcaaagacaataaacacataactcctaatgttgataaaaatatagagaatgaaacattctcatgtagacattccttacaagaatataaattgatataacctttttggagggcaagttggccatgtgtgtcaatgaccacaagaatttgcatacatttttcccagcaataataggatgtttaaggaaaaagtttaaagttaaaggaaaaaactatgggtatgcatggtgatttctctttgctttatttataatcattaaatattaaaaccaccctaatgtccaacaatataggattgcaatgaagtaaataaaatatgatatatttatacagaggggaaactgatgctttagaagaatatttagtgatatgaagaaatacctgacagtgtggaaatcgtcaatatagtcacaaaatagaaaataatgcattgactaaaaatggcattgtggaaactgtggtaagatgttcacaatttatatttgaatatagtaagcaacagatacagaattatatggtatgatcctatttgtaaaataaaatgtactatatacacataattttgtatatataaaaaagttactaatttacttattttctaagtttattctaagttttctgtaataaaatgggattcagtttcaggacaaatactattaggtgcaaaacgtcaagcattacttcctctttcttgctaactaaaccccaatattatccacacagcctgaattgtcccagggcatgagtaatgactggtctaggcttagagcggacatgatttaaaataatgctaattaaacaattttcaagagaaaaagcactttaaaattttttgagaaataaggaaggtgtctttgtctgctcagtctgctatgacaaaatactatggacaaggtggcttataaacagcagaaatttatttttcatagttgtggaggctgggaagtccaagattaagttgcctgtagattcagtgtctgatgaggacccacttcctggttatagacagatgtcttctgcatctgtccttgaaaatgacccaactgtcccatagacaggttttttggggtttgtttgtttgtttcattttgtttgataaacatagaaattgacacttctaatcttaaatcttgaaacttacaattgttttatctgagttccttcctcagggaatgaccttcatgcctctcaaaaaaaagtatcacagatctgaaactcaccagatcaccatatcctggctatgagatgctggacccctcatttatcatgattgtttccttgcccctccctagttcctattttcttacatattgttacattgcttccctgctatagaaacctctagttttggctaggtgcggtggctcacgcctgtaatcccagcactttgggaggctgaggcgtgtggatcacaatgtcaggagatcgagaccatcctggccaacacggtgaagccccgtctctacttaaaaatttaaaaataaaaaaaaaaaaatgagctgggcgtggtggcaggcacctgtagtcccagctactcgggaggctgaggcaggagaatggcgtgaacccaggaggcggagcttgcagtgagccaagatcgcgccactgcactccagcctgggcgacaaagcaagactccctctaaaaaaaaaaaaaaaaaaaaaaaaaaacctagttctagtggatcagggaggagatggatttgagagtgagctcccatctccttggctgaagaactcgactaaagccttcttccttggaaatactcattgtctcagtgatttgctttctgtgcctgaagctgcagggcctagaccccctggtgttacagtaacatcctcacatagaggaagctgaggaagctctctggggcctcttctataggggcattaatctcatccatgacggctccaccttcatgacctaatcaccctccaaaggccccacttccacacacaccacttggagtttaggatttctacatataaattttcgggaaaggacagaaatattcagaccgcagcagaaggtctaagtatttttaaaagaaaaagaaaggagaagacagaggaagaaaagaggagaggaggaaaaatagaaggagaaaaagaaatcaagagatgtaaaaaaaagtcacatttaatcacacttggaatcagaaaacaacagagccacagtgacaaccatgtgatttagtgtgggggaaagtgcagcaagatttcctgtggggggatgtagcagcacaactttttaaataagcaacttttatggaaaaaaatttgactttaccatttttcgtatattctgatttggtaatttcattctcgtcatctgtcctgagaaaataatctgtgggcaacgctgttttgttttattttgttttgttttgtttttgagacggagttgcactcttgtagcccaggctggagtgcaatggtgtgatctcagctcactggaacctctccctcccgggttcaggtaatttcctgcctcagcctcccgagtagctgggattgcaggcacccgccaccatgcctggttaatttttgtattttttagtagagacagggtttcaccatgttggccaggctggtcttgaactcctgacctcaggtgatccacccgcctcggcctcctatagtgctgggattacaggcatgcgacaccgtgcctggccagctatttatagcaataaaatatcaaaggcctaaatgtccaacatgagggaaggggtcactctgatggggttctatatccttcttcaaacatgattatcgagagatctaaatagcaggaaaatgtttgaaatacgatttttcaggaaaaaaaataaaaaaaatcaacaatgtataggggggaaaatgtccagaaataaaagtggaaggaaatatgccaatgtataatgagttggctcaggaatagagagaaaatatcattattatttttttactacttggtatttgtatgtttctaaattctgtataatgagcatgcatttctttgaaaacatcagaataaaagtaaattaaaagatgtagtaataattatatcaagagatcccttctttggtaagaaaatgggttgactttgctatgcctgctagacattatgctgtggcagaagtaatcaacctgcattgtattctgagtacttcctccagaaaacagctctgataagcagtccaatctcagaggaaggtgaagaagggcatcacaaaagtgtcctccagtatccctgtatttctgtctgtttttatatcagctgctcctgcgaaactcctataacaaccactaaaccagccccaaagctggtggagtctagtgagatattcatttcaatggatttgagcttctgttgttttaatgtgtatgtcttgtgtgtcagtaagtgaatttctgtgtagtagaataaatagatttttccattttttcctgcaatgcctgtatattactctaatcggaaagatgggaccacatttttaaaagaatattgttagaaaataattgaaggggctttaaaagtaaagatcaaaaggggaaatatttctatttttttctcaaataaaatgtcaaaagtgtttcagctttgagttagcattcaaccgtcctgcaatgctttggagagtgagaaaaggtgtggcatatctcccaaaacacaaagaagaatatattaatgaatgtattgtctgtggccgtttcatactacaacaccagagttgtgcagttgctacagactgtgtttggcttacaaagccaaaaacatttattatctggccctttgcagaaaaggtttactaaaccctggcgttacatgtcatgacattaaaaacacttgagtttgcaaaatctgtcttagagaagatagataagtttctttcaataatgctgcttttagaaattcaaccttaagctttcttgacagaagcacattgaatcaatttggattgcctctggctgcaaggaacaggaaagccaacagtggcttatagacacagggtgaactcagctcaggcaggacagactctctggtgccatctggctgtttccagcttttcatccttagcaagaggtgcttgtctgtgcttttgccttaaggtcacaaggtgctgctgcaccacagtcctcaggctcaccatccagcaggaaagagaaagaaaaagataactagaacaaaggcagaaaagcaattcctttttattctggagggcctccctttcctgcgatttacagcttcttttgaatgccctgttatgtcgtatggcttttggaaacagcagagttgcctgggtgagttatttttctttaactaggcatgttgaggccacaaaccatatgagggttttgttagatagaaaggggacgacatgtacattggatgggcagctgatggtgtctgctgcaaatatatacagcatcaccaccaagaagcctatgtattgatacattgaatgtatcatctgctttcaaattgttttactgcaagcagtaaaatgaatgcaaacccctaggtactgactaagcttgtcccctgtcctgcctagttgtcagccctgtttcctaatatgaggctgtcctttctagggtcctttgaactcccttcatatctctcccagacaaaagctctaaaggcggagataaagctcctggggctgggagggcacagccacccgccctcagcagcacatctgttcagggatatgaagtaccttctccttgctatagaagcccctagttttagtgggtcagtttactttcccccatctcctccaaggacaaataatttgtatctgtagagactgcccttggccttgtcttcggtaatccatactctgagttatttggtggggggaggggggggcggggggggggcgcattcatatctcatggctccttaaagaagttccaaaatccagacacatgaccgactccctggtccctgcaattttaactcatctagaagaaccactcttgatttctgaatggttcctccattgtaccatagaattctgacaggtatttcttaattaaccgttcaaactttcttccctgaagagtttaacagcacaaaaacccaacaaaatatgcataatctttaaataaactcaacaaagtctgcttcataaaagcattacactttccaaattctttattccttcacccacttcttcaatatttatgaattatagatgtggaagaggatttatcatgataaagtatctatatttcaaacccaccagtgatttacttctcaggggtgaccaaaaaagatgcagattgatgtgcaacaattgaacacaggtgggagtgtccaccctctgccactgtgctagttatgcacggtgttgttccgtttccattgtctctccaggagccaccttgagactatttgttggacatgctcttgctgattcactcactgccatcatccaaggcagaagatactgagaatcatacaaacagggacccattccagaattctaaagggctaaagctgaaaatgactttagtgattccctgagcaactttctaattttagagactaaaacccccaaacccaaagaggctgagatccccgagcctctcccccaagttttaattggtatgttacattaaacaatgtaatttggctgtgttctgtctccctgcattggactagaattggccttgaaatgagtaaatacaaaacgatactatggtgcattcacgtgttcaatattctactaacacaaagataataaaacagaaagaaaataagattgaactaaaatatcctccccctttgccaattgtgctcccctcccactgctgcccgagttatagcccagagcccaagatctctgtctgccagctgtcaatgcaaaattctttccacccatggtggtgtttgccatgtgtaggcaggggcagtgggaaaaagtttatagaaactttgacttccagtcatcacttgtaagtgttccatgcacattcacacagtcaaccaaaagcatatgttccgacaagttcacactctcccactgccctccccggcatcctcagggttatgtagaagagactagaacagaaagctgtttctggtttttgtttttgtttctatttttattctttattttaaagaaggtagttcttggaagcaattggctaaacttctcaccaaaaattaagattaaaaaacacaatgggtgacctaaagaggccaatcaagtagtaaggaaaccagaaaatgccaaataaccaagcatagcattattctcaaagggggtggaaagtctatacagaaattaagcccaagaaatactgagttgatttacagctgatctaactaatgcatttcagagggaggaacaactctcctcccatgactatatctcatgagtttgcaatgcatattataaatgatgcaatgagagacgggatccatatttcctggtgttaactcttggaaaagaatgtgatcatctaagggttgcaaaggagattctttatctgtgcattaatatctaagttactggtgtttctgaggttggaaggcatttatcttgttcaagccatttcttattcatcatcatcattgtcataataaaagtaacatttcttgattgcctgctctacttaaaggcaaattagatcttactggagcaaagtctctccgggtcaggattgttgggcttgatgctgtgaacactctcctggctgaggtcctaagcagatcactcagctgctacaaatgttctaccttcatcaaacaagagcctaaattgtgtaggatttttggcttttagggtgtgtttgggaacgtattttcttcaacatctgttgaaccggccactgtagattcattgagtacgagaacagtcattccccaggctctcctgtcagtgtacatcacgtggtttggcatttgcacaacagagaaataagcaagttcattcaagatgaactaaggaatacactgattgcaccagtcacacaccagagttattgatttcatcacggttcataacttgtaagtaacagtagctatagtaattgacatcatactttatatgccacaggtcaattgcagagatgatttacctgtgttcagtagctaccctagtgatctctatctcctggtattcacatgcaacctgaacagggctgactggtattgccaagaggatattgtagaaataactgtgtatgacttccaagtctagctcacaaaatatattgcaggttccattttgttctctcctggattactaactctggggaaacgaagccaccatgttgtcaggacactcaagcaaagacagccctttagagaggttcacaaagacaggactagtggtatcctgccaccagacgagagggccatatgaatgagccatcttagaagctgagcctccaacctcagtcaaactttcagaagactgcagccctggccattgtgactgaaatcccaggagatgccctgagccagaactactcagctaagccacttctgaattcctgatccacaaaaactttcatatagtaaatgtttactgttgaaatttgggatttttaaaggcatcaatgggtaaccttgtaactcatgagcaatgataactaacgtcgtagttaaaaacaacagtacagaggcagaaaatttgagttccattacacaaaaagacaaaacaggcctaggggaagaatggaactgatgtttcatgtgaatttcacttatgcccttgtttggtctagtctacttctgacaagcacaaaaactaaataaggaaattgggtttacggcagctaagtaatagtccaagaatccacagaagtagtgaatggcaaagctcagattcaaacacaattctgtctgctttcaaattcccatgctctatccctgtataaagataaaagcttctcccaagatcaatgaaatctgaaatactcatcatttatcactctattcattccagaaaaagtttacacgtctatcatcagaaatagtgttttatgccatacaaaatgggccattgtatccacaacacaaggcacatcagcctcaatgtggtttgctgaatgcacatttcagtttgtttctgcaccacgtcttcctgtgtgttctgaaacaaaagtgcatttggcaagaataaggcaaaagaaaaattgctaatagtgaagatattgctcccaccaccatcttagatgcaccagttaatacaaagtagatctgagacacaaagcctacccagtctggaagatatgagactgtggtaggcaggtcccagagccgagaatcagaagaagggtactgctaggcagattttggcaatggcagtttgtgaccaacagcaattccctgcatttgttttggcctcagttttgccatatgtgaaatgatggtaatgtactcactggatgttccctaagatccactcaggcatcctatgttatacatgcatatgcacagatgcgcacacaaggcagggacttggagagggagagagggagaaaaagaaagaaaagataatgtagctatttgttatttgcctgctcagtattcattgctgcctctttgggtcataaggcctgatttgtttttattgcaaagccgcccctcttcctcttctactcttagtccgtgaccctgggtgagtctcaactcagctctaggagtggagaatgtaactcaggcttggccaatgaaagcactggcattctccaccttgatgattaggtcagggatggatgcatgacctaaaggagtcctgttaaaataaatctcaggacatcggcaggagctacactttcccagtgagattgaatctggaaggttgttggctttagttagagttgccatagtcattttgccaccagtggtaaagtcagtgaaagaagagccaagagacagagagaaactaaatcctgatgactcaccggcgtcccaagaccaatgattctaagcaggaattctctttcaggcagtgttttggtttgggcttctgcacaagcggataatgagacaagatttctagtacaagtaactgatttgggagatgatcccaagaaaactaatagggaagtggggctgtgagacagagaagggaatgaagccaataagggatgatgcggtaggcagaattttggcccctaaaaatgtctgcatcccaatccccggaatctgtgactatgttaggttacaagtcaaaggtgaattaatgttgcagatggaattaagtttgctaatcatctgaccttctgatagggagaatttcctggaatattgaggtgggcctaatgcaatcacaagttccttaaaggtggaagagggaggtcagagtcagagagagatttgaagatgctgtaatactggctttgaggatggaagacggagtcacaagccaacgaacgcaggcggccagcaaaagatggaaaagacagggaaacaaaatcttccctgcagactccagaaaggaatgcacctcgctgaaaccttgatcttagcccatttctgacctctgagcttcataaccataaagtaagaatattttaatccacttaggttgtggtaatctttcacagcagccataggaaactaacatgagtgtgttgtcaagtcagtgactgtatgggcagctggagctccatcccgctgggaagctctgacagacagtgcagggcatgcttcaaagtggcttcaatcccaggtgagaaagctggggcattcgtctcccagcccacagtcatctgtggttgagggttgtttccaggcacgctatctagcacttccatattgtcagagtggtattcatagatagacagcaagcccacaggcagaaagtctcaggtgtttgcagtaagaagcctttggtggccgggcgcggtggctcacgcctgtaatcccagcactttgggaggccgaggtgggtggatcacgaggtcaggagattgagaccatcctggctaacacggtgaaaccccatctccactaaaaatacaaaaaaaattagccgggcgtggtggcaaacgcctgtagtcccagctacatgggaggctgaggcaggagaatggcgtggacccaggaggcggagcttgcagtgagccaagatcgcaccactgcaccccagcctgggcgactgagcaagactccatctcaaaaaaaaaaaaaagcctttggtgtatagaaggaaagtccaaggacaacagcatctgccacaagcacctcttagagataaatagctgggccagaagtggtgggatacgggacatggattttaattatcattataattgggggcttctactagtatttattggctggagctgggtatgttgaacaacccacaatatttgggataattctgtaccaagatttatctcacccaacatgccagaagcacctccttaagaaacactggctgagaccaagccgctctcctcctaggccattgcatcagactaaccaatgtatttccttcctccgtgagctgggttggaatgaattcctcttcacttagcccaaagaacttcaagtgctactcgtagatgacagagagacagagatatatggagatctaggtattcctttctgtaaaaatgtccaacaattgctttcagaagaaaagagaaagccagcaatccacaacagcttggactagattcccatccattcttcacacttttttgcacagtgttgaaagcaacgtaaaatcagctcagcccagtcagaacattctgtcatgaagtaacagagacgcattccaaaaagaaggaaaaggggattgcaacgtgcttttttactccccaaagcacatacaccataagccggtaaatgttcaaagatcaaaacaagagccaagcaacctgctacctaaagcctgtcctgctaatgcccatgtcagcaaatgaaggacagtgagggagaaagacgttgagatttttaaatggaaaggatggggggaagaaaatactttattttcttgctttaaaatactctgtggaatttttcagcacctgtaacctttaatcagccttccacttgaactctggagtggaagaagccgtattatcaacatgcgtttcagaagcaggtgaccctgaaggagggatgcagaggggagaatctgggaagctgatgggacaggcccagggtgacccatacatcacttctctcaggcgcccaccttagcgaatttcttaagatacttcctgtattagcctcctggggctgccatgacaaatgaccacaagctgagtggcttcaaacaccaaaatgtggctgggctcggtggcttatgcctgtaatcctaggattttgggaggctgaggtggacggatcacaaggtcaggagttcaagaccagcctggccaacagggtgaaaccccgtttctactaaaaatacaaaaattagctgagcacagtggcacgcgcctgtaatcccagctactcgggaggctaaggcaggagaatcgcttgaactcgggaggtggaggttgcagtgagccaatatcacaccattgcactccaccctgggcaacagaatgagactccgtctcagaaaaagaaaaacaaacaaacaaacaaaaaaaacaccaaaatgtggctgggcccggtggcttacacctgtaatcccagcactttgggaagccgaggcgggtggatcacttgactggtcaacagggtgatatctcatctctactaaaaatacaaaaattagctggatgtggtggcatgtgcctatagtcccagctactcgggaggctgaggcaggagaatcacttgaacctaggagccaagatcgcaccactgcactccagcctggttaacagagcgagactccatctcacacaaaaaaacaataataacaacaaaatgtattctctcccagttctggaatcttgaagtctgaaatcaaggcgttgtcagggccctggtctctctgaagcctctgctaaggtctttccctcacccttagcttctggtggctgccagcaacccttgaatatcccttgctgtatagacatatcgcgccggtctctgcccgtgttgtcacgtggtcttctccttgtgtgtgcatgtctctccatgtccaaatttctgtcttctcataagaacactggtcattggatttagggcctactctaacccagtacaacctcatcataatgtaattatgtctgtaatgaccctatgtccaaaaagagaagctctttgtcaatgctcagccagtcttcatctagctgtcataccctgggcatttcttctaagttccctgcctctgagtggagcctcgttccctgggtcccgagagcctttccttcccttcccagttcagtgctacaagccgggtgcccgaactctcttgtcaactgccttctggctgagtttggctggtggaaggcactggcagggaagtggttgaaatattaggttagtcatattaaatcaccaatatctgaactttttttaacctgaaaaggcaatttcatataattgtaagtagtttttgttttgctggttggacttcaattgataaggaattgagcttagctgtaaagattggccctgctagaaagattggccagcaaagctgaaagtcattccccagtaagaagtaaaaactacccatttttagttcagcgtgggctaatttattgatcatactctttaattccctccaggacaaatcggccttgttaaaactgctaggaaatgaagcagacgttgtcaggagcagcatgttatttaagaagtgaaggaaatattggtttgatttataataatttgcattaatggttttaaatcataatgttgtagaattttctccttagttcagctaaaaccagggtcttgtcacatgaccaggaaagattaggctcgcagacacacagaagggtgagaaaaatggaattttattgtttgaaaaggaaaaaaaaaaaaaacacagcaaagcgagagaggtttctgtaaacaggcccacatctcacagaccaaaccccaggttaccacccaggaacaggagaggccaggatcctccccgctgcaaacaactggaacttcccaagaccccgccccatcttcccagtgagcaagtcggttgcagattctccagggagccctttttacttggctgtctcaataacacctactaataaaaatgcagtggaggtcttaggcttgtgggaacctcaaccaccattcttttattttaaaaccacgatctgacatctaagttaatgtatccttctttcaagttgtctgtttgaaaggctctgacctttttccaggattaacatcaaaacttctctcaagaacctccctgacacagcttttcagacccacctttttagtcctaggataatttcactgactttgacaactcactttattcgtcggattaatcgcaaactgacttctcgttgttacaaaagggtgagctctcccttagatggaatgtgttgtcaccactctttaatattctaaacaaggcctgaaaaaaaggtgtttgccacatgctttaagctgtcgtaggagcaagagtgtaagctcacaagccagctactcagaagaggccaatttttatttagaaatttaagccctgttacattcatttatttttaaagtaccttgattttataattccacctgtttatgacaaaaccactgtttttcacaggaagcacaaaattcatttaggcaaagaagtgtgaaaatgaatgaagttctgctccagctcagcttcagaggaaccaaagccacttgtaccacagaggattctacaaggtcccaactgatcccaaatggcttcctactaactgtcacagagccgaatcacacaccattagattcactgcttaggtctggtgttatcagagggcctgccccaatatatggacatgtcatgagatgaggaaatgacccatcaccctatggagtccaccgtctgttttgttttttttttttcagacggggttttactgttgctgcccagggtggaatgcaatggcgcaatctcggcttaccacagcctctgcctcccaggttcaagcaattctcctgcctcagccttctgagtagctgggattacaggcatgcaccaccacacctggctaattttgcttcacgcctataatcccagcactttgggaggccgagacgagtggatcacctgaggtcgggagcctgaccaacatgaagaaaccccgtctactaaaaatacaaaattagtccaccatcttttatcatcttgattagataaactgtgggaagcagagagcagtagcctggggaaaggggcttgggtagacaagctttgatgcgtgagttgtctgcagaaacaccagaagcatgaaagagtttggcattgagctgctgagctcaggaggtagctgcagacacagggctcctggctgagccctggaggtggtgggaacatggggctgtggcagcctcagggcctgtgtcagccaggtgccccttgagcaggggagcagagtcactgtgagtgttatgagaaaaaaacttttattgtagaaattagaccttgtatagttgtggagggagctgaagaagccaaagtctcaggggcagggggtgcgaggagaggatccttggtggcgataccagccagtcactttgagaagccaaacacaccttgctgccaaatgaggccacagaggtagagggcaggaagggggttgccgctgacactgtgtcacctcttagggtctacagccaaacacctaggaagaccagcagtcagcatcacgggctcggcagaagagaggacagaggacgcccgctgaaaaccccgagcgaccgctacatctacccaccaccacatctggctgatcaaaaggcctccagacagcaacggccacggcttcacgtctgcttttaaaatctcactcaaatttccctttgggctagctctaactcaaaaccacacggggacctttcagctgtagattctgaagaagtttgttatggaaacatggcctcattagaataatcggggagtggataggttagattattgattggaaatattcattcttcaccctcccatcctcccatgaaggatagagtgtattttcctattccttgactttaagtttgtccatgtgccttgcctcagccagtggaatgaggcgattgaggatgtgccaattctaagcctaggattaagaggcttcatgggtttccactcaaattattttgctctgccatggacatgagactagactaccaggttggactcttgcttctaacaggaggataagagacataggcagagttgaaccagtccagctgaacccactatacatcagccaaatgctggctgacctccagatgtgtgagcaaacctaccaaaatcagcagacccggattaatcaacccaacctagattagctgaccccctgctgactcccagatgcatgaattacataaatgcctactgttgtatgccactgagcttgtgcggttgtgtcttacacagcattactatggccataagaaaccagaacagaaattggtaccagaagtggagtgctactctaacaaaaacccaagatatgttgaattggtttggggaccagtggaaggaagtagagaaacctaaagaggctgagaagatgatgagagaaaataacttgaggatgctgaacagtaatgattcatgttaaggagtctgaaatagaaaatgtacccaattaacttatgaatctaggcatggacatctccaggcagaatactgaaagtgtgggttggttgcttttgacttcaaaaaggagatgagctcagaaaagaactggccagtttgtaagcagaatttggagggaatatgaagaatttggaacgtgctgagttagaaaataaaactgtttctcatttccagcctttccagtcagcaaaatattttcaaattaggatacagcctgggagcaataatcaaccccagggtgcttccagcaaggcctgacctcagagtaaagaccaaatcaaacacacagttgcaagatacattgttaagaacttcataagaattaaggtggagtctagtaatcctttcaattgttcaaaaagatttttagaaaacttaagggtgggatgtgagagcagtctgatacaccacctataataccagtaagcacatcgagaaaggaatatttttaaatgaattacggatatggtttttggtacatagactagacggaaaccaaatatatataaaatacacaaatttttctgagagagccagaaactgttccaaatataaaaggatccctgggcccctgtatttgagttctccagaactctgaatagttcgatagatggatagatagatagatagatagatagatagatagatagatagatagacagacagacagacagacagacagacagctagctagctatgggggatggagaaggattgattttaaggaattggatcatataattgtagaagttggcaagtccaaaatctgagttctccagaactctgaagagttcagatagatagatagatagatagatagatagatagacagatagatagatagatgatagagagagagagagatgatagatatggagggatggagaaggattgattttaaggaattttaaggaattggatcatataattgtggaagctggcaagtccaaaatctgtagggaaggtcagcaggcttgtgacccagggaagagtcagtgttgcagctctagtccaaaggcaatttacagacagaattttctcttctccagaggaaatagtcttttatcagccttcagctgattggatgaggcccacccacattatagagggtcatctgcattactcaaaatctactggtttaaatatcattcccgtccaaaaattgaccaaatatctggattccatggtctagctaacttaacacacaaaagtaaccatcacagtcccaacgttcttcaaaatgaaagccaactgggaaagtttctgggccaccaatagagcacattttctgaaatctttttcagaagtgccccaggagatgatacaaaagggagaggaactcagagaacagagccaagacttatgccaaacaacagaatgaggaactagactcagtgacctgaacctggggctaatcagagaacactcaacgtcatcaatgcaggggagcctggcaacatttgccaagtgagatttcaaaattgctatggaccagtgactaatatgtgcctcccattcttctcccttttacctaggtgtgcttactataagtatcctgtcctcattttactatattattctgaatgtgtgtgtacaggagagaaatcaatgtgttcttttacttcgaaaggagtgaagaggagttacatcttgccctgatgtagaccatgagatcttgaactttgagtctaacaccgtgattggatgaaacttttggaatcttcctattgaggttaacgtattttgattaatattattaataagagggtgattgtatcaacttattattcagacattcattttctcctcccccaatacacacacacacacacacacaaaagcagagcatgtattactgcctctagactttaggaatgccatatgacttgctttggtcaacagagcaatgtggaattgttggtgtatcaggcctgagcctagcccttttgaggtctcatgtgtttccacttgctttcttcatgggaaaacatgtccaggtgagcttgctggtcacataaggaaagcaatagtcacaaggcagtggagatcagcccagtgtagatcagctgacccgccaattcatagatgcatgagcaagtccaggcaagattggaaaagccaagccaaataagttgagcctagattagatcatctatccccagacacatgatgcaaaataaataagctttttgttgtataaagttgagttttttctgggttagtccatttgtgttgctataaaggaaaccttaggctgggtaatttataaagaaaagaggcttatttggctcacagttctgcaggctgtgcaagaagcatggcgctagcatctgcttctggtgagggcttcagggagctttccaatcatagtgaaagggagagaagagccagcatatcacatggcaagagagggagcaagagaaaggagagaaggtgccaggctcttttaaacaaccaaatctcatgtgcactaatagagtaagaattcccttattgccgcaaggaagggaccaaggcttttatgggaaatatgcacccaagacaaaaaagtcactaagcaggccccatctccaacactgagggtcaaatatctccctccctcctccttctttccttccttccttccttccttccctgacacaaacaccactcaccaagccccacctccaacattgggagtcaaatttcttttttctttcttttctttctttctttcctttcttccttccctccttccttccttctttcctgccttctttctttctttttctttccttccttccttgcttctttccttccttctttctttttcttttctttccttccttccttgcttctttccttccttctttctttctttttcttttctttccttccttccttccctctttccttccttctctctctctctctctttctttctttcgacaggttctggcttggtcacccaggctggagtggagtgtggtggcatgacctctgcctcctaggctcaagccatcctcccacctcagcctcccgagtagctgggactacagactcatgccaccatacccggccacgaatcaaatttcaacgtgagatttggaggggacaaatattcaaactatatcactttctgattgcttgtgatacaacattcttgtgagcataggacatctatacaagaagtaagctggaaaaagctttaggagaattaataggggagggaaaataatatttaatgatggcttataacattgtactttttttaattcttagtaaaaaataagatgagatagagtattgacagatgcctcgtatttaatgtaatgaaagctaatttcctgttcccactcccacccttccaccatcaccgcttcccactgtcttcaccaacttgaaaaatggcaacttcattctaccagttgctcacgtcgaaaccttaaagtcatccttgatttctctctttctctcacttctcacatccaattcatcagcaaattcacttggtgcttcctttaaaatagatccagaatcaaaaaatgtgtctcatccctactacctgcttcaagccataatcatccttggtcttgactttggccatcctttggccacccctgacaccttcctgcttctcatgtgcccccctacacttcattttccagaggagagccagtattcttccagaagaagtcagatcatgccattatttttctcacaaccttacgatgaccgaccccctcccccccatcacttagaataagatttcttacaacggcccacggagacctaagagatctagattccgccccttacctctttgacgtcagctcttaccacagtcacccttgctggctctactgcagttgcacgagtttttgtggtagaccctgtcaggactaaggccacatccccacaatactcacaggttctcaactcatttgtgccttcctgctataagtacctgtggctcttgacctgagtactttctctggcatactgcacccgcgctcacgaaaggcacagtgctgcaaagcagccctcagctgatgtcagactggatttggagaatcaatatctctgcttcctcatcccttgggtgggaaaatactgagagcttatttgacacactggcctgggtcctcagcaggactgagccacttgtgcccgtggtgacagcttgctcattaatgcacctagtattttcttctccccttccctgtctcactttccttctctaccaggctttctgggatcacctcccaagtattctacttatactcaaatccttgtctcagagtctgctttgagaaaaacccaatccaatatagctttcttgctgtttcctaaacatgccaagtatactgcagggcctatgcactgacttttaactctacccctaatgcttttcttccatatagctgaatggctcactcccatgctcactcaggtctccactcaaatgttactttatccaaggccttccccagcaagcacactttccctcattcttattctcattcttttgttttgttttgttttgttttttgtgagacacagtttcgcttttgttgcccaggctggagtgcaatggtgcgatcaccactcaccaccacctctgcctcacaggttcaagcaattctcctgcctcagcctcccgagtagctgggattacaggcacgtgccaccaccctcgactaattttgtatttttagtagagacagggtttcagcatgttggccaggatggtctcaatatcttgacctcgtgattcgcccacctctgctggattacaggcatgagccaccgcgcctggcctcattattcttcttaacactttcaccctgttcatttgttgttggtggtcttccccactaaaacgtccctgtgtgagagcagagaatttgcttgcattgatcactgctgtacatttcattcccagcacctaggacagtgcctggcacatagtaggtgctcaataaacatttgttgaattaatatatttcttaatttctctctttctctcacttctcacatcccattcatcagcaaattcacttggtgcttccttgaaaatatatgcagaatcaaaaaatgtgtctcatccctactacctgcttcagatatttttacaaattttatttttttacagattttatttcacagatttatatttttaaagatattaatgacaatggcacttattgagggatttatgttttgactcctttaactctcttgacaagtactactgctatcctcacttcacagctgaagaaactgaggcacagagatgcctcagtttcagctggggtaagtggattaccccagccacacaaccaagatagaggagagatagaatttgaacccaggcagtttggttctagagtccacagtctttgccattttctttctgagtcccagaagtgtccacaattacactagacagctgatcagaccacaaactccattcttttttgggggcttgaatttttactttttggtaattttttttccaattgtgaaagcaatacatgttcattgtaggaaatgtgaataagaaaaaaaaatgaagaatattaatctcttaggaatgctgttcatatgtggttgattttattccaaatttttttcatctaagtatgtatgtcaaatatttgatgcaaaattagtatcacgcaatatacttttacattttgtcttactttttacaattttaatattgtgtcaggaaacacttgctgtgttaatattcttagaaaatagaatttaaaatgcctacacaatagtgcagtgaacatgtcttttaatttatttagaaatgttcttacccttaagtatttagcttgtcttaggttttggtttggagtaaatgaacatgtacataaatttctgtgtctgttgctggattactcattaggacaattcctagtaacagaacagctgattcggagggcatgcctgtggctgatatggggcttgatttatacttgcaaatggtgcttccaaagtatttgaccaatatgcattcccccagtggtagagaagaccccggtgctcccttgctagaggttgtttggctgagtcatgctgcctccccagcatacacaaaatggatcttacagacgagaaaataaggcttagaccaactgggtgacttatgtgagattagtgacaaaaccaagcagggacaacaaattgtgtttcctccaaaccagaagaaagagacacgaaccaagtgacacccaactggcagagataccacagcttgaaatgtcacctctccgcccaccaactccaccccagcccctggccacccacagactctcttgcaaagcaaacacagcatactatgtcttcagcgattccagaaacttcgcctcttggaacctgccggaacatttccaaatcatggccaaattataatttctctcacccacacagtcaccaaatgacccatgtgatgaggaatttgctatccatggcagacaagatccaacaccaataaaatgtcctggccccgggctgttcaaaggaaagcctctgtttttaaacctcgtattaaaaataaatacataaagttgacagctgtcagcaagacgtacgtgaactagaaactcaggtcattgtcttttgcctttttcttaaaacaagatggggtttctgtcctctattgtgatttgagccacagcagagggaccacagcttgttttaggattgcagtcaaagctatcactggaagaacaatttgtattgctatgccaaagctgggctgcatattaaaatattcccacttctccttttgtaacttggagtttctcatttctttttccaaatgtctatcaaaaataatctttttttaaaagaatagcaacttagcccttgaatcattaattttatttttttcaatctactttaaatatatatatatatttaaatgtagagattgtcttagtccgttcaggctgctataatgaagtatcatagactgggtggctcatacacaacagaactttatttctcacagcctcggaggctggaagttggagatcaggctgctggtatggttggttgggttctggtgagggctcccttccaggttgcagatggctgccaacttctcattgcatcctcgcacggtagaaagagaactaccaagttctctggcctcttcttattaagatgctaatcccatttatgagggctccaccctcatgacctcccaaagctcccagtaccaagtaccatcatcttgggattagagtttcaacatatacattttgaggggaacataaatattcagtccattgcagatataatgcattaattctgttttcatcatccactttggaaacagatatattcaaagatagatataatgcataagtttccaattcccttttttttttctttttttgagacggagtttcactcttgttgcccaggctggagtgcaatggtgtgaactacggctcaccgcaacctctgcctcctgggttcaagcaattctcctgcctcagcctcctgagcagctgggattacaggcatgtgccaccacactaggctaattttttatgtatttttagtacagacggggtttctccattttggtcagggtggtctcaaactcccaacctcaggtgatctacctgccttggcctcccaaagtgctgggattacaggcgtgagccaccgcgcctggctccaattcttttttaattggttaggatcaactacataaagagcagcaaacttctgtaactaaatgcagggttttacggagcttgagaggtctctacaatttgttatcttttagatatttagattttttttccttttaatctttatactcttatttcgaactttcatttaattttttagttgaaatgaaagttagacttaactgcaaacactttaagatgagctcagtttcctgctcacatattgtcttcagaaccccattccccaccggcatctgatgcccagccaattctcggtacacatttgtcatctgtttagcaaagaagaaagcctcacagatgtgaagtgacttacctaggctgcatcataagactgacagaggcagggccagaaccttcttctgaatcaaatcccgtcccaacctccctacccagagagaaagcctagctaaattgctaaattacctgcaggccaggccctattccagctgcatgcaattcttttttttttttttttttttttttgccttgcaatgcactgggggccatgttaagaacatccttagttcggtacaactttagactggtgggttgttgtctagaaaatattttttctactagaaaattatttgttcaagctttgggagaacttgcaaaaaacattttcaactttgtttaaaaatcatagttaatgcttcaaaacccaacccatgtcctaattccagtcctctcctctctagaggagagcgtagggcttttcctttccaccctgctgcccaaccagtagccaggacccttccctggagaggtcacctgcccaccatcctgtccccttcaacccccaagtgcaaagtcaccaggtgccagctccctatacccctcacccctcacctgcactctctcctgacggtgactccttgcagccctcacttgtacacatgggcaggaaaagggagccagttccttgggcatagggctgccccctaggcagaaagataaagatccacgccctattcaccccacctctgcccagtccaagggaagccatcatcaaccttccaccatctccttggcaaactccaattttttaacccacacacccaatatctattaaaatattgatttgttttgtaaataatatacaagtgttcaaataatttttatgtgtcctataaaaataaaagtactgaaatttgagataaaaataggtatgaagagaaatcctaatattttctttcagcacccccaggagactgcttacagaggtatttgctcgcacacatacacacactccttgaggtgtgcacactcttctcagaacctttccatccagcgtgttctggagcctgggtctgtagcatcagtgctctgcgtcgaccactggggagtggggaggggtgggcacccatcaaacaagcactttaggcacacttcacccatcctgtccaccatggacagaatgctagaggaaaaaaattttctcatgttttttgcctgtatctgcttttgtatttttacattaccaaagcccatcctactcagcctttagaattctaaagaatacaatttatgtaatgtatagctgagggtataggatggcgctcagttcagtatctttgtgtttccttttccctttcttaaaaacagggctttgctgtgtcaccgaggctggagggcagtggcgtgatcatggttcactgcaacctcgaatttctgggctctagccatcctccctcctcagcctcctgagtagctggaactacaggtgcatgccatcagactcagttatttttaaaattatatttgtagagacagggtcttgctcagggtgatctcaaactcctgggctcaagccatcctcctacctcagtctcctaaagtgctggaattacaggagtgagccaccatgcccagcctcagtatatttttttgttttgttttgttttgttttgttttgttttgttttgttttgagacgcagtctcgctctgtcgcccaggctggaatgcagtggcacaatctcggctcactgcaacctccacctcccgggttcaagcgattatcctgcgtcagcctcgcgagtagctgggattacaggcgcacgccaccaaacccggctaatttttgtatttttagtagagacggggtttcaccatgttggccaggatggtctcgaactcctgacctcgtgatccgcccgccttggcctcccaaagtgctgggattacaggtgtgagccactgtgccgggccagcctcagtatttttaaacccaaattattgccagagaaattggtatatttattcagatgaaaaatacttgcattagtaagcgaaaatatctgtcatcgtcactttacagaaaatggaaaaggatgaggattgcacaaaaactagaaattccatcccgggtgtttttcctcctcagcaacgggcacaggtcgttccagttttggccaggcggtggcgctcgaggcaaacggtgtcatgaaacggtcactggatgcactgaccctgaagatgctctcaaagcacgagtccgttcatcagagagtggacttgacacccatcagaaacattcccggagtgcgttggtgtgaaggtgcgaggagagtcggggaagcatcccgaagccctgctaggcgaatgggtactgctgagattacagggtcagcacaaagcagaatacaggacccgaaaataacagctgcaccggaagaatacttgaccactgtttaagaaggaatttgacgaagagcagtcaccgagtgcagccctgggccggctaaaggaaaagaaaaaaaatcactcaactgccgctcggcggcgggaatgccaggcgggtcagagaagggaaacagggtgctttgcagccgcggtgcaggcgcagggcaaccccctgcccagcactgaagtctagagcaggctctgcgggtaaataggagaaaatcctagtgagccttattgtgattcaacatttagaattttcccccagttctgaccttgagatttaataaaaggcgttttcaagttacactggttctcttttcatatggaaatgaatttggggtgattgttttcactggtgtcttattactttacgaaattatgagcacccctttgcaaggaaaaataccttctgtcctttggattgctggttaaatacgggtaattttcattcctatttaaatcaacttgaaaaaacaaaaggaggccacgtaggcaaaagttcgttttgaggaaggaagttctcctaaaagctagggtaagtagattttgcttcaatctgcatatttttcaaggaaagacttttaaaacgaaatgtttctaaaacctgaaattttaaaggcaaatacatagtctttttaataaagcaaagcatattctgcattcccaccttttacgagaataaaataaaatatctagagacaaatacatttggatttgtgaaaggaaaataaatattgggaccacaaaatcactaagctaaagagaaaagtcaagctggaaactgcttaggtcaaacctgcctcccatccctctgcttgctaagatgaatgcatatctgcttgcctcattttaaaaagttaatcagaaactcaaaagaggcaatcatttgtctcttttttttttttagatggagtttcactcttgttgcccaggctggggtgcaggggcgctatctcggctcactgcaacctccaccttccactttcaagccattctcctgcctcagcctcctgagtagctgggattacaggtgcacaccaccacacctggctaatttttgtatttttagtagagatgggatttcaccatgttggccaggctggtctcgaactcctgacctcgtgatcctcctgcctcagcctcccaaagtgctgggattacaggcattagccaccacacctgctcatttgtctcttaactacctgtgacatggaagccctgtctctgcttcaagttgtcctgcctttccagaccgaaccaagatacattttacatatgttgatcaatgtctcatgtctccctaaaatgtataaacccaagctattgccccgaccaccttgaacacatgtcgtcaggacttcctgaggctgtatcactggtgcaaatccttatctatcgcaaaataaacttcctaaattgactgagacttatctcagatagttggggttcataggttcattttcaatttctagagaacctctaatggagtcataattataaaagtctcattccatttcttggaaatttggggacagacagagagagaagattatgatttacaatggggcaataaggaagaataatggaaaaaaaaaagaaaagaaaagatcagcatccccttcaggaataactatgttttatgaggctgagccatgaagcaactaacagaatcatatcccacacctctcccagtaatgcccaagttcaagacaagctttgcagtaagagcacctgagtctgtcatttcatgtcctatttttctgtttcattttgtaccagtccctggaaaattctctgtgacttccttttccagcacataagggctcatgtctctgagagaagccaagtcctatcctctccagatagaatgaaaaactaggactcctccctaccacccattcagcccatgtgcacaggaattctcttccttcactcaactttcccacaacccccagagcatatgtggatgttgggttgttatctattaattgtgtgatttggaaaagggcagcaaaatggaaagcatattcctcaaatgtgtcctggggagctgcttgaaaaacacctacacagaaagtacaattgacgctctattttttccagctgcaccccttcttcacaacagatgtacactttggtgaaatactgctggtctgtaaaaaggaaaggtttatttctaaaacagtgtagtcattctctccaaagttataccataacccaatttaaaatagggtgggaagcaacccactgaaattttgaaccagctctaaattagagtccagaaaaacaaatgcctaaatagttaattacggaaagtccatccaggctttggatatcatgtacagatctttctattttcttccaaataaagaataatgaaaagaaatcagcggtagagcatttctgattaaatacccagaataaatactctatgtaaaaaagacagtgtagattcagtggtagagaatacagtttctggaagtagatttcgtaggtccaaatcccaacacttcaatttactagagtggtgaccttgggcaagtcattcaacctttcggtgactcaatttcctaacctccaaagtagacataagaaaattgcctcttgagatagctgtgtggtatgggttgatacttgtgaagtatttgggataggttctgtgctaggaaaatataaactgctcagcgtattttaccatattattgttccttttaactgatcactttttctcaacacacaggtaaaatactttactttcatcatgtttcaacagccacgtctaaaataccatgttctgtagggttttcaaaactgtatgtcacttcactagcaagaagggtaaaatggctatatgatttggagacgttccatacaataagcataaaactgttaatatttttaatatgttttgatgttcttggaaacaatctaaatatcctacaacagggaaataggaaacggttaagaaagttatggaagacggccatatgttatgggcgcactggctcaaatctataatcctagcactttgagaggcccaggtgggtggattacttgaggtcggaagttctagaccagcctggccaatatggtgaaaccccgtctctactaaaaatacaaaaattagccaggtgtggtggcacgcacctgtaatcccagctacttgggagactgaggcaggagaattgcttcaacctgggaggcagaggttgcggtgagccaagatctcaccactgcactccagaccaggcaacagagcaagactacatctcaaaaaaaaaaaagaaagaaagaaagaaaaagaaaaaataaaaaaaaaaagaaaagaagttgcagaaggggcagaggatttaaataatacaaataaatgcttgtggtgtgtcaagtgaagcaaaaagtgtaaatattttacaagtggtaaactctcagattataaaatggatagggatcgactgaaagtaatatgctaaaatgctactaatggcttctgcaagtggtggaaagtgggtactttttgttttctcagttctacttttactgacttgccaaatttttcacaagattgactgagcacttactctgggcaaagcacagctctaagtgtttcacatgtgttagtccatttgtgctgctataataaaacaccacagactgaataatgtataaagaacagaaatttacttctcatggttctgaaggctggaacgtccaagacggaggtgctggcgggtttggtgtccagtaagggctcctctcttggcttccaagatggtgccttgttgctttctctggaggggtcttctatggcagaagggatggaaaggccaaaagggcctaaactagtccccgccaggccttttataaggtactaatctattctaatccactgggatttaatcacatccccaaaggcctcatctctcaatgccattgatatggtttcgctgtgtccccacccaaatctcaccttaaattttaataattcccgtgtgtcaagggcaggtggagataattgaatcacggaggcaatttctctcacactgttctcgtgatagtgaataagtcttattaattgaatcacaggggcaatttctgtcatactcttcccgtggtagtgaataagtctcatgagatctgatggttttataaataggagttcccctccacaagctctcttgcctgctgccatgtaagacgtgcctttctcctcctttgccttctgccatgattatgaggcctccccagccatgtgaaactgtgagtccattaaatcactttttctttataaattacccagtcttgggtatgtctttattagcagtgtgagaacagactaacacagccatcaaagtgggattaagctgctacatggattttagaggagacacatttaaaccatagcaacatatattaatttatttctctctcgcagaggccattttacttaggtggtttatttttgccattttacagatggaaaaaagaagagagagtgagaacaagtaaactccccacagctctatccttggtaagtgaggtagccaagattctgaagcaggcttctgactccagagtgctcctaaccaccagtctacactgcctctttacatacacatcacttcgaaataagaaaaaaagttcattttaaagaaaaaagaacttaattttgccagacaaataatttgacaaaatatgatatttactttagaatacattattcatacatattatggatttagtcttcatgcagcccaatatagtatctgaaacatattagatttctatggcttgttttgatttttctgaaacactatttctttcgaatttctttggtgaaagtaacttctaaaaatacaaatccagatttaccctctaaacaaacacaaaggacataaatcttattacattaaaagaaatgtacttctaaagcatatttgggtgaggatatattgaaatatgtctctgcaattcatatctggaaatggccctgtggagaagagaattacaggatgagtaggtaatgaggactgacttctacttatttaagaatcataaggcttcattaaattccaaggtttacttcattttctatcttctttaaacatcaagtttaagaatttgaaccaagaagtagaagaaaataattatttatttaaaaatatatttaatctaacatcataagtgaagcatagcaaagtcttaaaaaaaaattgcggcaaattggtctgagagtccaccattatgacagattacaatgaccaagggcattcgcctctgtcaattgatattctaatgtcttcattcagcaaatatttactggacatcttccattgtgccagccacggatctaagatttaaaagcatttggcaaattcttttttgaattgcctactcagtctacagagtctacagatgtttagacctaaggaaaccagacatcagggatatgttgaaccttccagtgtcaaccctggacaaagctttcctttgaaaaggtaaatgggaagcataaagaattctccttgaaaaatcttggtagacgatggcacaaagtaggtgagggtttggatggtgatggggggagaagcctagcaactgagtttatgaaagattctgggaaagccttacccattcaatgtgccagaaataaacctaaaataagtggcaccattcaagcaatgacattttgagaattaaaacatagccaagtctgaaagcaggacacaccatcactaactcaggagaaccttgacatgaaacaatgcccccctgcctttcctcttgcttctctttgcctgtttgtttaatcaaattacgctacagccatcctacaactgcacagtgatttctgaaaggactccactggagttcattccatttgcatcagtcaaagaagctgtctttcccttcaaattgccttccctatagccttcaaaattggaacaagggatggcttttgtcttccagccttaccaggaagatgaaagtgaaacagttcccttctctctgcagccggtctgcacacgatgatctgcccaggaaactgtaggtatattgtaaactattactgctctgtagataaaaaatggttgtggtgagatgccaagaagtctttatttatatatttatatatatatttatatatatttttatatatttatatttatatatatttatatataaatatatacatttttatataattatatttttatataattatatttatatataaaatgtattttatatataatgtattttatatataatatataaatatatttatctatatttatatatttatatatatatatttatatatttatttgtatatacatttatatatttatttatacatatatttttatatacatttatatatttatttatacatatatatttatatatttatatatataaagtctttatatatctggtttcctctcaatctctctctttctttccttctttctttcttttcttctttcccattttccttccttctctccttccttgctccagatttaacattaaaactcacatgatgccacaagtttgagcacaacatgtctaagaacaagttcttaggagatgcgcctgggccccaagaagcacaatgatgatgtgctcctgggcctggaatctcaaggctcaaggagctccatggtcctgacccaggtgatgaggaggaaagctctccactccatcaggcctctaattccacacctggaaaaaagaaagacgaattggaccagagtctccccaagtctcctctcgttcttaacttgtagttctagaataatggaatgtcgggagcccacgaaagctgccttcctccaacaaatgtgcactggggtagacccctccttctttccaccctgctgggttgtactcagaagcatctctgctcttggctctccttaaccatgctatggccaaccacaccctccctgaaggatggtggtatgagtcgctcaccatcaacagctcccaccttcctcttgggttcttcagcagcttcttaaagtccctggcaagaggagagagaacctaatacttatccatcaatgtaatgggtatataggaatgagatgtaatcacctttatacattcataatttaatcctcccagcagcccaatgaaagccaatcaaccattcatggatccaacaaatatttcagagcctatttcttgtgtggttggcagtggggcctgcgtctccaatggggacacagtagagctgaactgccatccaggaggtgactctcaatcaggaaacaggaaacaagagagcacacaaataaaaagatagcaggaagggaggtgcccttaaattaagtgaaggggcaccttaaagggaaggggcattaagtaagagatctgaggggttgaggaaaccaacattgcaggtgagggtacaggccaaggactcagggagcctggtgatctcaggctcaaaaccttagtgtggctggaactaagggggaagaaaaacattacaacatccccaaggtaggcagggcctcagatgctgggcagcaaatgtgggttttatcctgagtacaaagagcagtcatctgccaaggagcccagtgctgcttccactgcaaatatctaggttccaagagcccctcaacccttctcctccctggacaaagatccaccctcaagctacttctcatatcattcgcttgcatgtcgctgactctcaagcatgctcctggtcatatctgggacttgttcttcaagtcttatcttttattgtagcacaaaaccttttggcctccgttatgcaaattcgagataccagtcatttgaggaagaagtagagaagggagggaaaacagggtcatcttccccagctgccctaactcgtttctgcaaaagactaatgtgtttccaaactctccaagcacaagagctcccaagcaattactttagggaagccaatgataaatttacattgaattgctgggtttatgaaacgatagtgtttccacaagtgtagactgcagaagttttgagaggtatcaaaacttattacataaaggtttggcaatatggagtttatagaaattaagtaggtctcttgactataggacttctcagaccttaatcggcaactgcagggcaggagtctctggatcatcatggcagctatgttggtcccatgtccctggactctgctggtctgctttctcgtctctatctagagtactatataagtactaggaaggcagagattgtatcttaaatattgcatgtcttgaatggtgtctcaagcatagtgagatctcaattattaacaaatacttattaataaataaatgaaggagtcaccagcaggtgattattttccaaacttctcatatttttttcatggaacacatctttggactcttgctaaagaacagaccccttaggaatgcttctaaggaatgctgcttcaggaaaaaatgacaacaaaactatgatgtgtacaggttctttacctaatatggaagaacctagaattcattattatatttggtacttttttcttgtagggaacttgtgtcctctaaaatttatttaaactaaaaatgtcatcgtcatcatcagtcaagatagccatcttgctttgtttctctgtctctctctctctcattctctctctctgtctctctctctctctctcattctctctctatctctctcattctctctctctctgtctctctctctcactctctctctgtctctctcattctctctctctgtctctctttctcattctctctctctcattctctctctctctcattctctctctcattctctctctctctcattctctctctctctttctctctctctctctctctgtctctctctgtctctctctctgtctctctctgtctctgtctctctctctgtctctctgtctctctctgtctctgtctctctctctgtctgtctctgtctctctctctgtctgtctctgtctctctctctcattctctcattctctgtctcttccacacacactcacctacacaatgatgcatggccataattattaaaaattattttcagattagaaaattcagagaagaaaacaactattgggaatcccaccagttaaaatgttggcatttttctttctcctggtcttccttctttgctttttgttctgaaatcatgctttttttttttttcttgagacggagtctcactgtgtctcccaggctggagtgcagtggcgcgatgtcggctcaccgcaacctctgcctcctgggttcaagtgattctcctgcctcagcctcctgagtagctgggatcacaggtgcgtgctaccacacctggctaatttttgtgttttcggtagagacggggtttcaccatactggctgggctggtcttgaactcctgacatcgtgatccatcctcctcgtcctcccaaagtgctgagatgacaggcatgagccaccacgcccagccccaaatcacgcttttcatgcacacactggacatgccatgggagggatctaccagataccttcctcccttctctcagaagcccggtgtgctctgcatgcccgcagccccattcttgggccaatccaaagcggctccttttgcatgaggaactgaccagaggcacgctggagccactgagccaagctggcttgagcttcctgcatacctgggcatctcaaaggctggaagctgctcttgagagtgaatttcctataagctaaaaccctcccactgcaaaaagatccgtcttttccccactacggtaaaaaaaaacgtaattccttttccttctttcttattctgcgtatagtataatgtctttaaaagctgttgcaaaagtaactgctcgatatgtcactccaggacactaattgtttagtgggaacacacatttcctgaattcattgcagggttataggtcagttgatttattattatttgtgcaaaagtaaatggcttttgaagtgaagctgcttcctggcaacagaggacgatcccagccctcggagtgtgcgtctgcagcttacgaccggacgcatcccgggacagggctgtggtccttcacagcacctgtctgggtctggccctctcacattgcaaacttcgcaaagacctgaacaactgaggcagctaagtgttcgggcatttttcctactcacttttttttttttttttttttttttttgagacggagtctcgctctgtcgtccaggctggagtgcagtggcgtgatctcggctcactgcaagctctgcgtcccgggttcacgccattctcctgcctcaacctcccgggtagctgggactacaggtgcccaccaccatgcccggctaatttttttttgtatttttagtagagacggggttttaccgtgttagccaggatggtctcgatctcctgacctcatgatccacctgcctcggcctcccaaagtgctgggattacaggtgtgagccactgcatccggcccctgctcactcttgacagagtgaacaagcactcctcccccctccccaaaacactgaatcccagcattcccaacgtgcaagcaagcctttcacagaaaagcgttacaatcttataattaaattaggtgcttgtgggaaacagcacaattaaaaccagaaaataatttaggaagattaaacccattaaggtaggacttttcttctttagtggagaggaaatacaattaggtgaactaacttattaaaaacacctacacagatatctaaatatctcccaaatgcactgaaatgctttgctccctgtgaggcagaaagactccacttccttttctgccaaatcaaattagaaagcccaactcaatgattccccaggagaaatatttacacctcaaaatagattgaaggaaatctaatctgaagctgcccagaaattactacagaactaagttatttctgtcattttagggtggtaagctcatgatttcatgataagagcacccattctatcacctaaatttatataaaccttgaagaataaacacggggtagagatctacttttcaggatatggacagaaaagttcttgtggtcttacgtaattacaatataaaaatgggtatagatatgacctgacacattatacaatagatcatttaggtataatgtagacttaatgggcagggcacagtggctcatgcctgtaatcccagcactttgggaggccgaggcaggtggattgattacctaaggtagggagttcaagaccagccttgccaacatggtgaaactccgtctctactaaaactacaaaattcgtccggcgtggtggtgcatacccatagtcccagctactcaggaggctgaggcaggagaatcgcttgaatccgggaggcagagtttgcagtgagctgagatcgtgccattgcattccgcctgggtgacagagcaagactctgtctcataaacaaacaaaaacaaacaaacaaccaaaaaatccttaatgaacatgtatgtttaacgatatatatatataggaacagttatagccagatgttctcagagtttgacggttggagaaatataacagtgattaaaagcttcacctttggagtcagatgaacttggatctaacatggccataagcatgttaaatctgtctctaaattttagcctccacatctgtaaaatggagattctagaaccacctttgaggaatgttatggggattggataaggccatacctattgtttgctcagcagtgccctggtacttaggaaatgcccatagtcactattttaaatagtaaaaataagctgggcacagtggctcatacctgtaatcccagtagttgggaagctgaggcaggaggatcacttgagcccaggagttcgagatcagcctgggcaatatagtgagactttgtctccacaaaaaaatttaaaaattagctgagtatggtggcatgtacctgtagtcccagttgctctggaggctgaggtgggaggattgcttgagcccaggaggttgaagctgcagtgagccatgattgtgccattgcactccagcctgggagacagaatgagaccctgtttcaaaataataaataaataaataataaaaataatagtttccacatcccaagctcctactatatgccaggcactgtcgtaaatgttttatctacgttacctcatttaaccctaatggtgatcttgtgagcaggtatatttaattccacacacatgttacaaaagaggaaattgaggcacaaaaccttttggtaatgtgctgatatggtatggctctgtgtccccacccaaatctcatcttgaattgtaatcctcttgtgtcaagggaggggcctggtgggaggtgattggatcatggggacggtttcctccatgctgttcttgtgatagtgagtgagttctcatgagatctgatggttttttaaaagtggtattttctccttcgctctctctctctctcctgccgccatgtaaaacatgcctgcttcccctttgccttccaccatgattataagtttcctgaggccttcccagctttgtggaactgtgagtcaatcagacctcttttctttctaaattacccagtctcagacaatcctttataccagtgtgagactggactaatacacacaccagtgtcatacgtccagtacatggctaggcctgcatagaaacccctcattcctgaaccacatgataagagcttagatcatttctttggtaggtgggaaaggtggtctccagagcaaggaagcagcactagtaccccagttcacgaccacatttcaaaaagcagtgtcatgtactcctgtcatcactgttcactgttagataataaaggtatgcagtctttgctttggtcccatgtgcggaaatttcagatggaagctgaaccagacttagaaacgtaggacaagtcaccaatgcctagaaagatgctttagtagtgtacatctccctcagttcattctcacattgctataaagaaataccggagactgggtaatttataaagaaaagaggtttcattggctcaccgttccacaggctgcacaggaagcatggcagcatctgctccactccggaggaggcctcaggaaactttcaatcacggcagaaggcaaaagggaagcaagcacatcgtatgtggcagggacatgtggaggagagaggtgctggtaaacacttttgaacaaccaaatctcgtgagaactcactcactatacagtgccaaagagggatagtgctaagccattcatgagaactccacccccacgacccattcgcctcccaccaggtcccaccttcagcactggggattacaattcaacatgagatttgggtggggacacagatgcaaaccatatcaacatcataggatgagaagaagcagccaggcattttttgaactactcttgataaattctttacagataaataaaacactttaatgtttggaacgtttcaatcacagtgtatgaaacgaatgttagttactccatttctttttatttccctgtactgtacatttataactgacgctaagacaaccttgaatgtttggacaaaatggtttaaaggtcacagaacactcacaaatttcccgttaattattaaaactgttttgcccagtttcagcttgcaccatcagttttatggccctgctgtaaggtgtaaatgctatatttgttaagtgtctatacatgtggagtgtgttcatttcctacaaggctgatcacaatgctagatgaaagtgtgcccctcccctgctcctcagaccctggtgggttctgcttctccatgcattctgggctggcttccatctccagaagtgattcttctcctgtgctccccttccttacactccctagtaatggcttagctacacagccttcctgcctctcagtctcgttcctgcctccacttcctcctgaagctcctgaaacaaacccaggctattccttttttttttttttttttttttttttttttgagatggagtcttactctgttgcccaggctggagtgcagtggcgcgatcttgacttgctgcaacctctgcctcccaggttcaagcaatcctcccacctcagcctcctgagtaactggagtacagccacatgccaccacgcctggctaatttttgcatttttagtagagatgaggtttcaccatgttggccaggatggtctcaaattcttgacctcagatgatccgcccccttcagcctcccaaagtgctgggattacaggcgtgagccacgtgcccggctccatgctgttcttaacacccttctattccatgacaataagagctaacgtgtcgagtgcatgcttgcttgtaagtcattttagcctcaccctcacaaactctgacaagcagggtgatactagtatcactcccatttggcagaagaaactgaggcacagagaaagcaggtcacttgttcaggccaccagaaagtgtcaaggcaggcttcagacccaggtggcctggcttctgaacctgcgggctggaccggcccacctgggtgcccttctgtggtccttgcctgcagtcatttttgctattgggcccaggggcacaagctagtcatgagacttccaaaaaatatttaaaattggggaaaggaaaaatacagatactctccagaatatgaaaactgcaaaaacaaaaccaatccatttaagtaagtgtgtacacaatataatatttatggcatttaaaaataactaaatttggtttttaaaaatttccattctattataaaaataacatgactttgaaagcattccctagtgtacaggttaattggctagacatcacagccaaacacaggataacttacgtttgtttttttgtttgcttttttgttttttgtgtgagatggagtttcgctcttgtcacccaggctggagtgcagtggcgtgatctcggctcactgcaacctccgcctcctaggttcaagggattctcctgtctcagcctcctgagttgctgggattacaggcacacgccaccacgcctggctaattttttgtatttttagtagagacaaggtttcaccatattggtcaggctggccttgaactcctgacctcaggtgatccacccgtctcggcctcccaaagtgttgagattataggcgtgaggcaccacgtccagcctacttatgtttttaaataaattgataaaatcatttcaaattattttatgcccaaatacatatgcatgtgatgtgaaatgtggttgccttttcaaatgtgtgacttgacataggcaggggtctcagctttaagaaaaaggggaaaccaagtcctcaacatggtcttgtctttccctgggcccatagctcctatgtagatggtcccagaccaattacaaccggatctgcatgtccagctcctgccggggaccaccccagctgcacctctccagacagcagggacaggctcgggcaccttgtccaaggcagaaagacatcagagctaaggctgcctggattcaaactgtcattctcctgccgagtaaaaagatgaccttgggggcttacttaaccttgctgatctcagacatgcctgcttcaaggggctgtttgtgaagattgcctacctgaaaggaagaaggtggggcaaaattaatccaagcagataatttatttggccaagcttgaggattgcaacccgagagcatagattcaagttgtcctgaatctacaatccaaagagcgcaggtagacgtggatttttaaaaacaagaggcagggagttggctgctacaaagttgtttgccaggaattctcattggtgtacacgaacaacattgaagagcaattggttatacatggttaagctataggttgtgggttacagcatcccctgtggcattattaggttaatctacagctatctgtggcaatagcaatagtttaaagagatgaacacacagctcaaagtgggaaagtggagaatggttgctatctcattttaatgcctctctgggcctgataatttgaaagggctcacgttcctcacatgaaagttcttttctttcctctggattgagttcacacatggcacatggagtatgacctgtacattcattcactcaaaacaaaaaacaaaacaaaaaaatagctccaggcagtgactcatgcgtgtcatcccgtactttgggaggccaaggcaggaggatctcttcaggccaggagtcggagaccagcctggacaatatagtgagatctcatctctatttaaaaaaagtttttttttaattagccaggcgtggtagtgtgtgcctgtggtcccagctacctgggatgctgaggtgggaggatcaattgagtccaagaatttgaggctgcagtgagctgagattgtaccactgcactccagcctggatgaccaagcaagatcctgtcacaaaaacaaacaaacaaacaaacaaacaaaactatgcagcagcaactatgtgctgggccctgttctggaccctgggatacagctgcaaacaaaggtcctgctcttatggagctcacatcttgtgagggagaagcaggagatggagatgtaacgtgctcagggtgatgagagctgaggaaagaagtgagctggagaaacggattgggacacgggaaggcatcactgacgcggggtatatgagtgacagcttggatttgtgtccctgcccaaatctcatgtggaactggaagaggggcctggtgggaggagattggatcatgggggcagatttcccccggctgttcttgtgatagtgagtgagttctcatgagatctgatgctttaagagtgtgttgcgcttcccggccgggcgtggtggctcacacctataatcccagcactttgggaggccgaggcaggtggatcacgatgtcaggagatggagaccatcctggccaacatggtgaaaccccgtctctactaaaaatacaaatatagctgggtgtgttggcgtgcacctgtaatcccagctactcgggaggctgaagcaggagactcgcttgaaccggggaggcggagattgcagtgagctgagatcgcgccactgcgctccagcctcgcaacagagcgagactctgtcaaaaaaaaaaaaaagagtgcgtgtggcgcttctctcgttgctccctctctctcctgccaccgtgtgaagaaggcccttgcttccccttctccttccgccatggttgtaagtttcctgacgcctcccagtcatgcttcccgtacagcctgcagaactgcgagtcaatgaaatcccttttctccacaaattacccagtctcaggtagttccttacagcagcgtgggaacagactcaagagctgaagcaagcaaggccgttagcaaggagcgggctggggagagcactccaggcagagggaacagccagggccagggccttgagacagacgtgagccaggatatctgaggaacagcagagaagccagtgtggccgcagctaaatgaggaacaatgtgtgagttccctggggcggccaaaacaaacaccacggacgggggccttcaaccacagacaccgatttcctcacagctctggaggcgaaaagtccaagaaaactgcacggagtatctatgaggccctgatggagacctgacctggtccacacccatggcctggcaagctagatggggtgaattttcacctgccacagtcgcaagtcaaagccaccggcttctctcttctccctcccattgctcctgacagccagggttaatattttgcctcatgtaaacagggaggcatccacccgagaatctcccctcagcccacataagctctgcagagagggctgtgttgctccagttcccacctggacatgagcactttgaagggcagcttccctcccggggtctggctgagctcagggtaggcgtcagtctgcatggattggatggaggaaggctgtgcgtggcaggagatgacactgcccttgggctgtgtggtttctctctgttccgagccctgttcctccaccttagcggaatagcgcctctccatccagttctcatctttgagaacgattcttgggatgaaagccacgacgttggatatgaacaacctggttgccaagttgtttgcatttttgcctcctctcctttctgaagggaaaagctgtccttgtgtggggccacttcagaccccagtgagcaaaaggagtgatgtttaggggaaggcagggagagcagaaacttgcatattccacaccttctgcggctgggcactgggatgggcctttctcatggccggtgggatgggagaggagagaggtctccatccagcaccacttacatcacacacataagcgacctggggtattagtggctaggagtgcaggttccagatatctctcaggtatagtctccgcaggatcctgttcctcccttaccactcatgaagccacttttccccccaggagccttggtggcctcctatctaaagtggggatggcacacaaatccatgtccttgtgacggtcccatgagagaagcagacagaccctgtgcacacaagggcctgcagggagaagcgctctacacgtggcgacaccctttcctcccaggatggtctcctctgcattcctgctgtcatcccagcgtcccacctgattccccaggacacagctgactagaaatcagccctggactagaacccaccgcccgccaggggtgggtacgctttctcggaggcccccatggggaggcaaaatggaaaaccacacccaatactcaacctacagtgggccactaattcccaaggcaattctgctgtttgtatctgtgggagaaatgcatttcctttgttttcgaaaaagcagatggccaggtgtcattggcagaggggctgcagtgagggcagtgagggagagcagaggaaatgaatggacagtgcagaggacaggccaggtggcccacaaccaggcagacagctcacgttgccttttctggaaatagggactgcatgaccaatctgtgcctgtgcctctctggcacacaatggacaatttcggaaaacttcaaaagaaaaagccaagttgattttgctaaaaatgtgaagtttctctctctctctctctctatctctttaatgcaatgcatagtttatcattttcttgtctttaggattaattaaagacagggctaaatttgtttaaacaagctctaaaatattaaaaaagaagaagaaggcaaagtacatagtgtttccaagtccagggaacattctgttccctgggcttcagtttataactgaatgtgctttacgtttagaagacaagctatagcttgtaaaatgaatgtggaaataatctaaagtatgaggcctccattatttattatgtaattggagaaaattctggctgggagaaatctctagctgaaagccaagatgatccctactcaatcgttcttaaacaaaattaacatgtatccatttctttgataatatttcactggcaggcagttcctcttctaggctgctatgagcaaattgccaagttgggtgtcacccgtataatcattatcatgggaaaccgtcagagttccttgggcaagggaatcaaagatttcaagtgttgacattttgttaagtaggttttttataaagtcttacatttagaacttttcagaacatgtcatctccaaaatcagtaatcattaaacgacgtccaagaccatgtttttgagatccttctatactctaaaagcattttgataatattattccataaactgccccttttttattaaatgcatatcacaatcttttcaaactatgaatatggtcctggttcattcaagagaaagaagctctgcccagtgcagtggctcacgctataatccaatcactttcagaggcaggaggatcacttgaggccaagaatcggagaccagcctagggggcaacaaagtaagaccctatctctacaaaaatatttaaaagttagccaggggtggtggcacatacctgtggtcctgcctactcaggaggctgaggcgggaggatcccttgattccaggagttcaaggctgcagtgagctatgatcataggattgcactccatcctgggtgacagagcgagatgctgtctcttaaaaaaaagtcattggtgatgactttctttattgcctttcattaacaaagtaatttccccatagatgcctccctcccgccatctaggacttgtggaggtcgaaaatatcatgaatgaatgttcacttttataaaatgttcttcctgcaccacttgtgccttgagaagctctgtggagtgcagggtcattctcaactttcttgaggaggggatgtctccacccccaactccactgtaggcaccctcttcccttaagctgctttaattttttttcacttaatattcactcaactatattctttacaagaaaataaattccaaggggacagggacttttctgccttacttctgtttccaagcttttagaaaagcacctggcacatggtaggtgctcaataaatatttgtggtgatacttattaagaaatggagtgacaaaaggcactgtgaattcattaacattaaaaatattttgtcttattgcatgaaattaatgcatacatataaaaatggtggcatgtaagtgtatgcgttatttaatctctgttataggtttctgaacccctgggagtaactccaaggatcagagattgagaaccacctatatcagggggaacaagtactaaattgaagtgccgtagactgacttgattctattacaggctgagcatcttttatttgaaatgcttggggccagaagtgttttggatttcagattattttggattttggaatatttgaattatacttaccaattgagcatcccaaatccaaacatctgaaatctaaatgttccaatgaacctatcattaaagcatcttgtcagtactcagaaaatttcagattttgaaacattttggatttttggatttgggatgcttaacctgtacctgctaggtaactctgaacaacaccacttaattttcctgagtcttggtttaattgtgtggcagatgggagtaataatagctgatttacctactcgacatagctgaaaatagaatgatatgtatatatgcaaatacattttgtaaactacaaagaaccatacacatatagattatttttgctactataataaaacataggtcttgggtccgtaatcccagcaaagcagaggactgctgcctgcagctttagtcaatttgatcaccatagtctatcatcaccatcattagaatagaaacacttactctccctggggtctgttgaccatcccacgtgcgaaaaaaccctatacaaatttgcccggaatgtagactccccattggccacagtggtagtttattagcttcatactgtgtggagtcaatgactcatagaaggcacatttttcacctcttagccttggcagcaacgacccgttgctcaaaatttgctaacaggctccctcagctatttcctgttgtgttgcagtaacaccgctttttctttaggccacattaaattttaaaacacattagaaacatttcatccctggccttcctcttctagtcattgcaaaaaaaaaaaaaaaagtgctgtagcaaacatgaggattatgatgattggttaatttccctccattttaaccaatgaaatgtgttccttatcactatggttacataacaactagctcccacaggtggaatccagcctcaccaaagcacctgggatagttcatctactcctgctcactgattatatctaaatcaccaataatgacccaaataacttcgtatttttaaaagttatagaggttatgttatttttagccacttctattgtgaaatatacttcccaaacagaaaactgtgcaaatcagaaatgtctagctcaatgaatagcacgtagatttccttgctcttcttcagctatacccacctaagcatgacccctcaatactatagtttacttctgtctgtttttgttttgttttgttttgttttgtttttttgagacggagtctcgctctgtcgcccaggctggagtgcagtggcgcgatctcggctcactgcaagctccgcctcccgggttcacgccattttcctgcctcagcctgcccagtagctgggactacaggcgcctgccaccactcccggctaattttttttttgtattttttagtagagacggggtttcactgtgttagccaggatggtctcgatctcctgacctcgtgatccacccgcctcggcctcccaaagtgtagggattacaggcgtgagccaccgcgcccagcccctgtctgttttttaaagtatataaatgggattctgtgatatgttttctctagtatctggcttgttttgcacgtcattctgtttatgaggttcattcatgttcatgtaactgtggtccaatttcttcactgcagtgaagttgtttattatattttaaaaaacattttcatgaatccatttcattgttgatggacagttgggttttttccagtctaaagctgctatacacactgctgctgtgaagattgctgtacaagtctcgtgctaaaaataggcatgcttttccgctgagtatctacctaggagtggaattactatgaaagaaggaatgcacatcttcactttaatagataataccaaacctcttcctttagtgactagaaccaaatgtatgatatgagagagtctccatcactctccattgtcaccagcccctggcatggatattccctttaatcttagccaccttggtgagtgtatttggaatctcaatgtttttaatttgcacttttctgattacttaagagtctgggcccctttccctatatttattgaccatttgaatattgttctttgccaggtatcttcaagtgtcatccatttctgtcttttattttattttatttatttatgaattgggatctcactctgttgcccaggctggaccgcagtgaagctcactgcaaccttaaactccaagtgatcttccctcctcagcctacaggcatgagccttcatgcctggctatttgtaaaattattattttttgtagagatgggggtcttgctatattgcccaggcttgtcttgaactcccagcttcaagcaatcctctcagcttggcctctcaaaacgctgggactacagaccatttttctttttaaaatattatttggggagatttatttatttatttatttatttatttatttatttatttatgagatggagtcttgctctttcacccaggctggagtccagtggcgcgatctcagctcactgcaagctccacctcccaggttcacgccattctcctgcctcagcctcccgagtagctgggattacaagcttgcaccaccacaccagactaaaacatacaatatactgatttccatttccttggaaagattgttgctgggactatttcttattaactagttgcgtttcctgttttggtttttttgttgttgttgtttaggatttttagtgtttccttttattatgttttgagacgaggtcttgctctgttacctagactagagtgcaatagcatgatcacagctcactgcagcctcaacctcccaggctcaagtgatcctcccaccttagcctcccgagtagctgggaccacagggtaaagtaaaaggtaaagactgaccaggaaaggggatgggagtggggagaaaaaacatattaaactgaattataccttccaccttaccttgtattatgatcaaaagaaatccctctgctgtcctttcctcctgacactcttcccacaggcatgcaccatcatgcctggctaattctgtaaattttttgtagaagcaggggtcccactatgttgcccaggctggtatcgaactcctgtgctcaagtgaagtgttttcaaaatgacatatttctatatcttacaattttcctgagttttggtgttaattaaatgtacaattaaatcttttggtttttaaaaatatagataacatcttccactgtttaattctatactgttttttaaaaagaaaacctgaagagtgcaaacctgtagagtaagaaaaggggaggaatgaaatttatcttactcctcctgccagatgcagtttggtacatcttaacactaaatgctcattttactgaattctcactttaagaatgttccattatattttaaactctttataggcatattgattttgtgctgaaagagattaaacagccctcaagagtttcaagcaaattctcttagtcagtaaatgcatttcctctttcattcatgtcccaatgcccagtcaacattttttgtgtgcctgtatcacttaaccaacaaagattttggaaacaatctttggataatacaatatttgatttctcataatgtgacctgaagatccacatgattttgtttttttgtcagcccatgccaccccatggtttggaggaaccaaacccccagccttttgaggggtgagactcctggaattttcgtcccgtgccttcgtggggatttctcctgtatttagtatttgttcacccgacacagacttgcagagcctaatgcattccagacactgcgctgagtgccaggaataaagaaacatctgtacctggtacagtctggctggggcaagaaaccaccaacatgataagcaaatgaatgtataatgtaacagaacatgggttgtgccctgaagaaaaataaagactgaccaggaaaggggatgggagtggggagaaaaaccatattaaactgaattataccttccaccttaccttgtattatgatcaaaagaaatccctctgctgtcctttcctcctgacactcttcccacacacacacatgcacacacacacgcacatctgtaaacccctgacaacagtggtgacgtctatctcacctttgtgcacccccaaagctgaacacagctatgcatgactgacacaattttgttaaaccaaagaaaatcttttcatgatgtctccattaatttcatgtggccaaccagccattcctggaagtttcttgaactctctggagatcccttctgcctttaggcatcttctgtctactcagcgagtagttcctggggctttcctaatggcatttctgcttatccgatatctgctggatgtcgttcagaaaaatgacattggaggctgaggcctcaaactttagctccatattcttggtcaggtttcagattttcacttaaacacagccctgtctgcgatgccaacagactttagctcaatttattatcagagggcgatctggcactcccatacagctccgcaaatgcctctgactatctaataactcatcattaaacaccacattccctgagaggctgtggagaccaggcagggagggcctctcccttctgaaaaaaggagccccttccagggctcacaacaaaatgtcaagtttggcaaaagataaaaatagaagtctttgtttcacacttgcaaaaaggctcaaactttcacgtgtgcttctgtttatattaaataaaaagcccatttttcttgggataaaagcatcttaagaagagttgtagggagaagagactaggtcctttcttaaccggaattcaactgattagaccctggccagactctccagtcagacccagaaagagaaaacagtgccaatccgaatgattcagctcaatccgttcaaaacaacaaatcatgaaatggcatcatggacaggcatgttacgataagactctgctaacgtggcttttgctgcaaagtgggaaatggttctgggaacttacagctttaataagatcaaacaatgcatcaaatggaggtctgagttggagatctgggcttcgacctgcagaaataagaattgaggcctgttgggtgcttcgctgctggcagtgctctctcacgtgccctttccagctggctctcacctgattctcagacacctctgagagctaggtggtgttctcgtgtacatgttagagatgaggaaacccaatctctgacagctgtctatccacctgtttggaaggggctgaactgtgttccccccaagctcatctgttgaagctttaacccccagtacttcaaagcatgtctttattcagagatagtctttcaagagataattaagatgcagtgaagtcattagcgtgggccctaatccgatctgactggtgtcctaacaggaagaggagattagaacacagacatgaccatgtaaggacacagggagaaggcggccgtctgtaagccaaggagggaggctcagaaggaacgaaccctgctcacacctggatcccagacttctagcttccaggacggagaaaataaatgttgttgaagccgcctaccctatggtactttattatggaagccctagcacactaatacattaaggtaagttctctgagggcagaatggggcttttgctatttcgatgaaagttcttcggattctgcaaagctgacctcatattctgtgatgattttggtagaaggcacacaggccacctgctcactccctgctcctctcattcctcctcactttccctcctattttcatcatcttccctctccctttctccttctttcactccagggggatatgtttgccaaccatctgcaaagtgcctactgtgtttcacgtaaacgcttttaatttacgtaactcatgctatttatctcgtcatgatttgactcttttccttttggatagttttcaagatcaatccttgttgcaagatgaatatttaacctgttacttttttttttggagacaaggtctcgctctgtcgctcaggcaggattgcagtggcatgaacacagctcactgcagcctcaaactcctgggctcaggtgatcctcccacctcagcctcgcgagtagctgggactacaggcatgcaccacctcacacagctaattttatttatttttctaatagagatggggtcttgctatgttgcccaggctggtcttgaactcctggcctcaagcaattctcccacctcagtctcccaaagaactgggattacaggtgtgggccaccacgcctggcctaacctgtaacttctaattgacacctcaacatttccgaaaatgcctttattctgcctgtgcactggattgatagtttctataggtgtagaagcccaggtcgaaaaccaccttcctgcagaaagccccatcctcttgtcattcccagagcggctgcagggaaagctacagccattctgagtcctgagtcttcatgtgttgccttttttcttctccctggaagcttgtaaaatcttcttcctgtcctcactgctctgaaattgcacagcaacgaggcttcgtgtaggtctatttttatctcttgtactaggccctttagacctgcaagctggtgttattcatttctggaaaagtttcttgaattgtattttaaagacttaccagcttctctgttctctcctcctggaattcatctggaagctgcatttcctggtctgggcctccaatttcatacattctctcccttttcttctctcttttcactttgctctattttctaatacaattttccagccatgccttctaatccttgtactgggtctttcattttggctatcatgtgactttccccaagcttgcccagtgcttgttattttccaaatgttgcttttttatggtctctcactttttttttttttcttttgagacagagtcttgctctgtcgcccaggctggagtgcagtggcgcgatctcgctcactgcgagctccgcctcccgggttcacgccattctcctgcctcagcctcctgagtagctgggactacaggcgcccaccaccacgcccggctaattttttgtatttttagtagagacgggtttcaccgtgttagctaggatggtctcgatctcctgtatggtctctcattcttgatgcatagaagaaaactcatctcatctctctaaaggtgttaacagtaggtgtagtcttggtttcctccaggtttcttttgacttttatttttactgagatacagttcacataagatgaaatttggccttcttaaggatattcacacagctgtgcaaccaccactatcatttatcccagcctatttttatcaccttaataagaagctccatacctgttaatattcatcccccatctccacctctccccagcccctgggaagcactaatccatttttccatgtctatagatttgtctattctggaaatttcatataaatgacataatacaacttctggtctttttttttttttttaagatggaatgttgctcttgttgcccagactggagtacagtggcgtggtctcagctcactgcagcctccacctcctgggttcaagcaattctcctgcctcagcctcctgagtagctgggattacaggcatccattaccatgcccgcctaattttttgtatttttagtagagatggggtctcaccatgttggccaggctggtctcaaactcctggcctcaggtgatccgcccgcctcagcctcccaaagtgctgggattacaggcatgagccactgcgcctagccaatttctggtcttttgtgtctggccttcttcacttagtatagtgttttcaaggttcatccatgttgtagcctgtgtcagtacttcattcctttttaaggctgaataatggtccatggtacgaagagaccacatgttgcttattcatgcatctctggacagacgcctgggttgttttccacctgttggctgttgtggatcgtgctgctgtgaacacgggcgcacaaactcaatgcggatttgacttgtgcttccctggtagctaatggtaacaatactcaatatcttttcacgggcttattagcccaaattgttttataactttttcatgtgcttttacctttcacatttgttacctccagcaggtccttagtggtcagccagtccttggctgctttgctgtccattttttttaagttgtcaaaatggtttttttcttttttaattttttaaaattatactttgagttctgggatacatgtgcagaatgtgcaggtttgttatgtagttaaacacatgccatggtggttttctgcacccatcaacccgtcatctacattaggtatttctcctaatgctatccctcccctagactcccaccccccaacacaccccagtgtgtgatgttcccctccctgtgcccatgtgttctcattgttcaactcccacttatgagtgagaatatgcggtgtttggttttctgaagccatcattctcagcaaattaacatttttttctcttttcttgagaaagagtctcgctgtgttgcccaggatggagtgcagtggcataatttctgatcaccacaacctccatctcccaggttcaagtgattctggtgcctcagcctcctgtgttatctaggactacaggcgtgcgccaccacaccctgctaacttttatatttttagtaaagagtgggttttgccatgtcggccaggctggtctcaaactcctgacctcaagtgatccacccaccttggcctcccaaagtgctgggattactggtgagagtcaccatgcccagcctgtctgttcatttttaatctggggaaacccaaaagcagatttaggcatttgcacaggggcccatccaccaagagctcccctgtagcatgctctgcctgaaccatttattaggagactcctgatgtaattttttttttctggaccagagaagatccttccagtctgcagcctggaaggtaaatgtctagttgccatcttagggagctcaggggctctgcattctgctgtgtgtctgcttcctcaacgccctgttttctgtatagtcccacctgccattgtgcctgtggtcctccatgccagcaactgcagttacagcttctccaaagaataaatccccaagttcagccagggaaaattaggagcgggcatccagggatccaactgcctcccaaacaacctttttttttttttttgaggcggagtcttactccgtcgcccaggctggagtgcactggcgcaatctcggctcactgcaagctctgcctcctgggttcatgccattctcctgcctcagcctccccagtagctgggactacaggcgcccgccaccatgcctggctaattttttgtattttttagtaaagatggggtttcaccatgttagccaggatggtctcaatctcctgacctcatgatccacccgtctcggcctcccaaagtgctgggattacaggtgtgagccactgcacccggcccccaaacaactttcatcccgtcctccttccttaggcctcctccactcccatttctggaggcactgggtcctgaacatcaatgttctgtcgtgcaaatcaggcaatttctgcacagctagtgtaggatttggctttcttaaattggccaagcccagctccactatccacctgcactccagcctctaaaatctgcaccctgttctctcttctcctggtcttcccatctatccttggggatttacaactttaaaaaataatctctttattgaagatagtcgagttccctcttcaccacgtttacctaggagccttcctagtgatgtctttaattttcacattgcattccatgttttacaacgattgtctcatgagacaatcctcatgagaacctctggggaagatgctgtagtcacctcccagtgaagaggaaattgaaactcacaaagtttcagggaggcatccgcatctgcacatggcaatgtggagctgggacttcagcccagatgtctgactgcggagcctgcactagtcctgaactaaacggtgcagtcattgccagttacttcatggctaggctttgccacagtggctcagtgaaaccagcacttcctcgtgcagggagaggaggacctgcaatgtccagggtaccatgctgatgggcagtgggaagctgtgcccagtgacagccctggtcatcagagataagaggggacgaatggcagtgcagaattggaaggatgtcttgagccagcactgtgccaaggcacttaaacaggacatgggtaagggtgggagcatcctcctcctcatgggggtctgctcagctccaatgggggcaatagagaactgcagctatttgagcattgatgagtactgctcttgaagattctgtgacttctattataacaattttcaatctctattccattgaaatgccctccctacaacaattcatagccaaattgcttccagagataattggtggagatcacaggttgctagattgatagcctttgttaatgaatccaggaatcatgaagtttcaccttggaagggacctggagaccttctagaccaacatgtttctcttggggaaactcagagaggccaaaggccagactcaaggtgcaaggctggtaagcagcagctttggaaccatttttgtggggagagcaggaagatgtgggggaaagatggctcaggagcctggagggggcttggggaaggggcccacgaaatgccagctcatggggctgagtaggaaaccttgcaaaggactaagatctctccgaaactccacatctagagccaatcaggaagatgcagcaatggccactgtgagaaaaggaaacctgcagaggacatctgttatcgatattttgaagccctaacttctgggacctcagaatgtgaccttatttggaaattggaaatagaatccttgccagtgaaattacttaagttgaggtcatatgagaaagggtgggcccttcatccaagaagattggtgtctttataagaagagaagaagggacaccgacataaagggaagaggacagccacgtatgtgatgatgcagacagagactagagggatgagtctgcaagccaaggaatgcaaggatggctggcaacaccagacgctcaaaagagataagaaaggatccttccctacagtcttcagaaggagcaaggccctgctaacatgttgatcttggacttctggcttccagaaccataagggggttctggtggtttatggtgctttgttgcaccacctggtttatggtgctttgttgcagcagcccttggaaaggtaattgaatgtcccgtgaggtgtcatgagggtgtgacctggaattagctctgctgctctgcatggcatcactttttttgtccttagtttgattccccttattaaaagtagctggaggccgggtgcagtggctcacatctgtaatcccagcagttcaggaggccgatgcaggtggatggcttgaggccaggagttcaagactagcctgagcaacatggagaaaccctgtgtctacaaaaaaaaatatgtatatatatacaaaaattagctgggcatggtggcacacacctatagtcccagctactcaggaggctgaagtgggaggattgcttgagcctagaaggtaaaggctgcagtgagttgagatcgcaccactgcactccagcctgggcaacagagtgagaacctgtctcaaaaacaaaacaaaacaaaacaaaaaaaaaacaaagagtaattgcttttaaacccaaagctaggtgatagtgagtgtttgtgtgctaacttccggtgagcactcacatgcctatctcgctggagtcctatgttcccaggcttgcatctgtctgcctgttccccctacgtctccacccacagaggtagccgcggctctgcagctctggagcctcagggctggaagcaggtgaggggaggcctttgttgatcctgctcaaccaatgcccccgctgccacatagaagaaacggtggacgtgtttagaaaatgataccaagtttacccctgaaacgcaattgcatatcctgtgcaggctgagtgaggcaaggtgaaactattgactggtatcacttgagatagagccaactgttcaaactgaaactgaaagacagcgtggtccctctgaggaaaaaagggcagaagtaaaagcacgaaattgtcacttgtgtagtggcaaacaaaaaagaaagagaaaataggtttcacttatttaaattataaaagtagttagtatgtgctgattcaaaaaacttaaaagatacagaagtgtataagatagaaacagaactgcgtctgcctccacctcctcccctgcccacaagccagccctccactttcagactccacagaagcaactgttttaatgcgtggtaaacatatttagaagaactttctctgctgtgcataaaagcatgctctaacatcatttggtttcacttcattttattttaaaaccacagtattcaatgacttgcttttctactcactagtatattatgggcaacttttcatagcaatgaatacagatttatctcagaacgtaatcttgaatcaatttcagaataactctgtgggatacatgggtgattataaattcacaacgtgccttgggggaatataccacctgtttctatggacgcaatttgcagtacattaattcggcacaccacaaaggctggacagttatcaatagattgggtcaagaagagaagtatacaaaacattcagctagctttaaagctaaggtttgtcaccacaaatctatgaagtgtctcttccgtgagttggagaaagtgattattagagaagcctcaataaaggtcaacagttacagatgatttgaaattttgccaacgtagaaaacagttggaaaaccattggaaattatattttttatcttgagtcaagtaggaaataaacttaatttacatagtgtaagaatggttgatatacaatgtaatcctaaatcttaaaattgctggagataaatcacaaagaaaaccaaaaagatccaaaaaaaaaaaaggagttaaaagagaagatttcatcttctttcagaggataaacaatctcaagattccataattctttgaatgtctcagaaaaacaaaattcgttcaagctacttcagatatttggaagaacaaaattaattttccccacccagatgaatcattctatcagaggttctcaactgggggcgattttgccccccacccccgggggacatttgacaatgtctggaaacatctttgattgtcaccactgggggcaaacggtgggaggatgtgctgctagtcttagtaggtggaggccagggatgctgctcaacatcctacaacgcacgggacgacccccgccacggagaatgatccggcctcaaatgccaacagtgctgaggccgagaaactctatgtgatactttcctaaagggactgctttctgtttcattctcttatttaatcaacttcacaaacacatcagaaacataggtcacatccttttcttgtgaatctaaaccagtctagcttaaaacaccctaaccttcctccaaaacaaaatagaagtgaacattttgtatgagagtgactcacatgtaaaactatgacgtgaggataaacagtaatgcccgaaacatacagcaggccttccaggcaggcaagagatgacttcagacattggagggtaggtcacgtctcacgcaacaaatccagaaaccatcctgcaactcacaagaaatctgcttgtagcttgaaaaggattctgagccaggagaacaaggttaaaattatttccaacataaaggaaaggaacaggaacttagcctcttacgtgcttaatcacctaataagacacacacacactcgcacacaaatcacacacacacatacacacacacacacttaaaatacttattttggattcttgtgaataaaatccagctcaagtctatgggaaaaaaaaatcatggccagaaaagtctttccattttcactgggtaccagccaataaatcttagcctctgatgctctactgaattcagcttctcactttcctaccctgctcccatcccacccccacaccgaatcagcgccagctctggattttacactcgtaagctcagctcaggccctggtagaggtggagcatctcattgccttattcatacctgctttgaaagatatccttgtcttactcagttggaagctctataagccccccattaaggccaaagaatgtgaaacatcacaaacagcacagcatcatgtacataaactgtttatttaagagcgggcagtcatagactgtgggtgatccgggagatgcatcagtagatttcctgtggcctcagaaaaatccacgcagtaaccgcaacagagagatgacaaagagtcggttgcaggaggcctctgcccagggagggtggccacctaccctgtgcagttcaggcagagcacaaaggctcctcccagggccctggggaaggctgaatccagcctgcccctggcttacctagcttggccccgggcagagcacttttcctccacccctcacagaggcgcaggttacttgtaccagcccgatgcaaatgctttggtgaatgggctaccctaaaacagaggatgatgaagaacgatggccattcccagagtataatgagggattccctttaagtgagctttgctctgccctctgcgttttcattagaaaccagaaaactgctgagcctaatttgtgtttaagccatcataaactaaataatcagttcctattaatgaccctaattattcagctcctatttttaaatgctggtctttcagcatgctctatgtgggtggttttaattaagcctaattgtagatacgtcacatccaaacagacaccctactcaaatgattaatagagcttggaatctagttcactaaataggggtttgcaatgggatgatggtgtctatcaagctgaaacgtatcatataaattatttctctgataactctaatggcagagagaattgtttattagagtcatttaggattagagccaccactggtctcagaagctacattctcagagcagttgtcaagtttgctgaaagattgttttcttaaattagctctaagttggaatgtactggtttttcttttgcatttatattcccagaggccttcttctttaaaagtgtcttctgacatggcaaaataactatcatttaagaagcactaatcttaactaaaaacaaacaaacaactcaccttcaatgtaaagaccgattgctcctctttagcccttccctagaaatcagcttttgatcactgaccaagcactctcaagcttccgattcccctaaatctcacctgattttccaacacctccgagagcttgacattgccactttttacacatgagaggtgaggatatcgaacctctgaaaggttatctgatcagcctgggatctcctggggcagagctgggcttaagaatcacctgcttgagatttcacctgcaattgcctgacccatggggctgtgacttcttggattaaagcatcatccatgcaccttgtcactctacatgggcagagcaagccaacctagaaaccaatcaggagccaccataacaaacacagccgtgactcagctctccacctgcacacctccacctgcccatcagtccacattggacacttaacacccacaaaggatttgaaattttcccaacggcctctcacaggacacataaaagcaaacacaagctgtcctcagtgctgtgctacagaatacgttatccattggttgatcacacagatccagtgaaatattgtcagggagttcatttgaaaactgttgttgccatgatgtgcttgtagtgccgtctgtcagagcagatattgacccattcaaatccagcggcataagacaaatgaccaatagagacagtcgtttccagggtagggtctctattatttttagcaaatttttccctgtagggttatgtttcggatgcttcaatgggcagattaagatgtactgtgacagtgatagagaattagcagtggatagaattgaaattatgtctcatttcaggtgtggtcttcaccaggtctcactcattggccttaattgtcaattgaattgaaagggggtccttgcagtcaaggtcagaatttgggaggctcagaaaatcaagagctgattgctgtccatggacagatgtgacctttaggtgtttggccacccagcccagttgacttggatgaaatgtgtagagaggctagagccacagactttggttaaatttatctgataggattctgaattccttctgtgttatcttgaattgctttgagttttctcaacacagctattttgaattctctgtctcaaaggtcacatatctctttctccaggattggtcactgatgccttatttaattcatttagtgaggtcatgttttcctgggtagtgttgatcttgtagatattctttggtgtctgggccttgaagagttaggtatttattgtatcttcactgtctggagccacagactttggaatcagacacacctgattatacatctcagctcctccattattcactctgtgactccagacatgttacaccacctctctgagcttctaattccctgcatccataaaactagacagtcatacttaaattattgaatcattgtaaggtttaaattaattaatggagacaaaacatcttactcataataaacaccagtaggtgtcaaagggagagagtgtcttttttatctgagcatttgtactgaaatgagaacattatgatagcagtggatagcaaagtcaaagtaaccataatttttaaatatcccctaatgaactgaccatgtagagaaatagttgacactcaaacccccttcacatctaccatcagccttaatggtagtctattgggtcaatgtctatgccagtcttagtaacaaatgaaaattgaaaacactgcaaatacagtgcaaactgatgacaacatgaaactccaaatcttgcctatgatataaggttccctgaagttaaagaaagtgatggaggaactaccatgattgttcagtgtgcagtgaaagctgatgttactgtaataatctaaaattcattaataaaatcccaaattggctgggtgctatggctcattcctgtaatcccagcactttgggaggctgaggcaggcagatcacttgaggtcaggagttcgagaccagcctgggcaacatggagaagcctggtctctactaaaaatacaaaaattagcctggtgtggtggcacacacctgtattcccagctacttgggaggctaaggcaggagaatcgcttgaacccaggaagcagaggttgcagtgagccaagatcgtgccactgcactccagcctgggcaacacagtgagactctgtctcaaaataataattataatcccaaattacttcttttcttactttaagttttatttttcaagacaaagtttcagctgtcacactgcccttgttggttctgtgaaatcatgttccccattttaagtaaattcacttttcagtaaaaattactctttgaagacagaggtctatgtatatacaaacttacatgtgtcatttcacagaataaggaagaaatggtttcacaaattatattgcatcaatgtgaactctctttgggcacaaacacaggataaacatctgtcagataggattaaagtgcctgtgtgccactgaggaatgggatgaagagagaaggaagataataagaagagaaggcaagaagaagaagaagaatcaaacagacagaaatggaacttccctcaaaggtggtgcagacctgcctggggcccctgagagcaggaaggctttcctcctgaatccagcagagctcttctcaccacgtggccagagtctgccttctgcatgaatgtcattgcctaagtgacttcgagatgcagatggagcgtggtttcaccctcagtctctcctcctctggttcacgcccatgtctgattcctgggcatcgctttgcctcagaaagccacctccagtctttcccacccacttccaatttgcccttgccccttcctccaagccaaggcagtggttgtataaacatagctgtatgtacaacactcagcttttacactggtctccattgaatgagtaatcgcattaccaaccttctaagcaagtcggctccctcaggactgccgtcttccagccctcgtagtacgaaaatgattcattagtcccttcatcacaataacatgagtcacatgttatgaaaagctaggaggatgtattttgtgtacactgaaatctaaggtttgcaaatttctgcaatttaactttattgaggagggagtggggtagaaatgaattccacattttttctaagtacgaaaacccacatcaggcaacatctgcttaagtcagtctccaaggactcaatgtaaacggttgttgatataaatagatgtgtttttaagcaaagacagatgtcccagccccaaatgttaagaaaacaattaagttcaaagacatgttggttttcatttctttcccaataggtgaatcttcactgggctatgacaatgaggggtggaagagagaacactgtgtttccctgtggaaaggtgtgttgtgccgtgggtggcaggtgtgagctgcacacatgcaggatggcgtccgcttgcctccctagtgttgctcgagaggcctgggtcatgacgccttcccttactcatgcattctcacggcacttgctgatttatttgaagactcccctattcagaactcctcagaatattatttcagggaatactaagtgggaggcattaggaaataagtccccggaatttgggggtccatgggagaagaaactagaagccagcaggactctggagcaagagtgggctatgggacaatggtcctcagtaggaacgggcctgcatctcgttctcccagagcaaggatctgaaatccaaaagatgatcaacaaatctgcatttcggcaggaggaacattcccagtgagcttatcaggaaagctagcaccaggcagaaagggtcatttctacacagagaaattcacattgtttgtgtcaggcactttgccagaaagcattttgacaaattccctcgttgaatgtgagggatgcaatgaagaatttaaagtttcgcaggaattagtgacataaggcaagttcacattttgaccataccaccctttacatggtagaaaattctaccccatatgcccaaagcaggtcttcccttccttctgagaagccgaggcaaagaccttcctggcctttgggccaagctttcccaggaagggaaggaaactgtagctgctttggagggttcctcggactaaattgggggtgccaatgctagaagataacacaggctggcaggccactccccgccccaggccccagccagagcatcccaggctccatcccaggccccatcctaggctctgtggtacaggcagggggaggatggctagtacccttcaccccgagggcatggccgcctttctgacatcacctgggagggggcaccccggctggccgaggtttaaggtagaaaagcctagctcctttgttgtttgtcatgaagccaaatgatctggaacttggttctttctcaaatggtcagaaaaaaatgtcaaaacaaagcccccatcacaaatcacctcaggacacatgtcacactcttcccgggcctgagcactattagtgattagaaacgaccactcagttgtgagcacacaggctgggcaggctgtcagaagttgcaaaagccgtcactggttgtgtcaggcggataccagaatcagtcagcgatctcaaagtctggtgtccatgctgccagacatctgtgagtattaggataaaatgtcatattaatcagacattcacatgaggccacaagcaacgcttggcatttgtagatgtagtgtagatagataagccaccccatactctcttcctggacacacaggaggaccacctttccaagcctccttttcctcccattgggttctggtgagaggtgtgtgggcagaggtgatgggagtcctgtagacttggccataaagcactctgagtgatctttgacacaccttcttccccttctgtgacaaccctggaggctgtgtattgaccatggtggcttcacaagacgtaaggagactagatccctgggttatcacatggagaagaacccagcagagctgctcaggctgtattggaatggggatgaggggaagcaaacctttgtgacattacaacactgagattaggagattgttagcgcagctagcatttactattctgatgcatgcaccttgtttctgggaagtacggatggataccaccaagcaaggtgctttgaagtagttcgtttattggcattttccagaccaagtgtatagtttaaaatcagtcccccaaaaaatcacagttgggaagagaaagagaagcccgagaatgaaaggagtatgatgctgctcactttgggaccgagtgccattagattcctagagtaacaagaaactgaaaggattactcagttcattctctaattctgagcatagctgtgcccagatcatccttgagggacagtctgttccctgttcccaaatgcagccaagcatgaaattccacagcccagactagtaatttagtgactcgaaacccgggccccgggagctctttctgagggccaatccaagccccttgctgggctgtatcttgctcccatttctccttttccctgaggaaacagactgttgcttacaattttgatatggtgtgtctgcatttatttgattactaacatcatatgaattccccatcactctttattcttgaagtaaaataatgcatttcccttaaatttatttaatccatccagcaattcctgactatgcagccagctctactccagggaagagaaggctcagtctctcccttcaaagaggtaagatagacacattaaaaagttaacaggatattgttacatgttacaatgaatgggaaggaccttgtgaagaagaagacatgagctccaatctggagggcttcccagaggaagtgggcttccaggggccctgaaagatgctaagaacttagaagagtcaagagagaagttaggacattaggagagaattctagaggccaggatgaatgtggggaaggatggcgagaaaaccagcttggttggagtagaaacttccactggggaatggacaagaagggctcgaggggaagaagagtaagagccagtcttggagggtgtggtaggtggaataatggccctccaagggtatccaagtcctaatccctgaaacctgtaaatatgtggccttacatggtcaaagggactttgcagatgtgattaaatgcaggacctcgaggtggggagatgatcctagattattcagatgttcccaaaatgtaatcacaagcatctttagaagggagagacaagtctcagactcaaagagagagatgaggtaatgaaagcagaggttggggagagagagttcaagatgctatactgcttgaagatgaaggggggccctgagccaaaggatgcaggtacctgtagaagctgggaagggcaaagaaatgaattctctgctggagcctccagaaggcatgcagccttgcagataccttgcttttaggaattctgacctctaaaattgtaagatcatatatttgtgttgttttaaaccactatgcttgttgtcatttgttaccatggccagaagaaatgaatgcagacaatttcaaatttgaagctgatgagactttaacctgccaaaaaatcagagtcttggactcagaaggtctttcaacagagtcatgaaatcagtcattcttcatgtgtgtgtagtgtgagctctccttaagtgccacaaaacacatccttgcccatattggtccccaagaaccccagcgtggatgacagtgcatcacacagatgaaactggtagagtattttctggatgaatgagcaaataagcagtaaatgctgcaatctctctctggttgaagtcctcaattcctcttgcctgaaccatttcaatatccacctcataagcctccaggctccaatcttgtctccattccaacctgctgccagggtcttcctctcatgcaagtggttatgtacatttcatccaaataaaattcaaattccttaaaatagcatatagctctttttggcttccctgggcaacatcagaagaagaattgtcttggatcacatgtaaaatatattaacactaacaacggctgatgagctaaaaaaaaaatagtcacacaaaaaaatatcataatatcttaaaaaagtattgggccacatgtggtctgtgtgctgtgggttggacaagcttggtcgaaagccttctatggcctcagtctatcactcgagcagaaaccaccaacacccacatgctttcctgtctgcgttggcagaacttcactattaagttgccctctctaatatgactttactattctaagaaatcgttgcccaggaaataaaagttactaattgtattgtttcaggaacttcccagaaaaactaatttaagtgattatcaaactactcaactcttcaataactagtatcaaggattatttactctccaatacacttctgagaaccctgccttaaaaccctcaccttgctgtcttcaccaatcctgaaccattatatcatgatccttaatcctattcaaacttctttccccattgaaagacctgccaaaccccctaaaccttacaaatagcccaactttgtcatactcacagaaaatactatgcagactttgttgagatagttgtgttgcttaccatgggaagcagtaaactcagctttgcctgaccagcaggttgttggggtgatgtttttggggagtcagtactggacacctaagtaaacttgttacttcatgcttccctcttctagaaggcagaataatggctgtccaaagatgtccacatcttaatcttaggaacctgtaaatatatttccttacatagcaagggggaattaaggtagcagatagatttaatgttgctaatcggctgactttgaaatgatgagatcattgatacagcttgaatatatgtccctgtcaaatctcatgttgaattgtaatccccagtgttggaaatggggcctggtgggaggtgattgggtcatgggggcggatccttcatggcttggtgctgttgtgataatgagtgaattctcaggagatctggtttttaagtgtgtggcaccttccccctacttgctctctcttgccctcattctcaccatatgagatgcctgctccatcttcttccaccctgattggaagcttcctgaggcctccccagaagccaaccagatacagtcactatgcttcctacatagcctgcagaaccgtgagccaaataaacctcttttctttataaattacccaggcttaggtatttctttagagcaatgcaagaatggcctaatacaattatcctagattctccaggtgggaacccatgtaaacacaaggatctttacatgtggaagggggaaactgaaagagtcagtgtcaaatcgatgagatgcaggaaagactcaaccaaccgttgctggcattgaagatggaggatggggccacaagccaaggaatgggcagccttagaagctgaaaaaggcaagaaatgcatttctacctggagcctccagaaaggaatgcaaccctgccaacacctagattttagcctggcaagatctgtattagacctctgacctccagaactgtaagataatcttgtgttgttttaacccagcaaatgtctgttcatttgttttggcagcagtagaaaaccagcatatctctccttgctgatgctcctttctccatctgaaatctcaatctgatctcactcttctgcctgttgaaatcctgcctaccctttcatttcaatggcagatccacctcctccaagatacacttccctgaacaccccttttctgaattctatcagcatctggtttgttctccttcattatttattatttttatttttttcagatggagttttgctcttgttgcccaggctggagtgcaatggtgcgatatcggctcactgcaatgtctgcctcccaggttcaagcgattctcctgcctcagcctctcgagtagctgggattacaggcatgcactaccatgcccggctaattttgtatttttttagtagagacagggtttctccattttggtcaggatagactcaagctcctgaccccaggtgatctgcccaccttggcctcccaaagtgctgggattataggcgtgagccaccatgcccagcctgttctcctttattttatacgatcacatttactagggtatgtagcgtatatcttctatgtcttataaataacttttgcacagctgaatggtaaagatttgtctattctttcaatgtaaccataccattatccctttagctagctaaataacatccatggtgggtacagaagtatcctgacagaagtcatgtatttgaggaatgaaatgtaagttcttcattaattaaggctgggagaatcttcctcttttggaaactaatatatcaacttgaaagtcaattctaataagaaggttgaaagaatgatatggaaaggaatttgtgaataatagaaaagaaatgaaaagaacactttctgtaaggctagcttctccactgggcatcagggctgttgctttgagcctatagcttttctagcgcctatgaaaatatttgaaagcctagacaagaaagaaacatcaggaagttaaaataggttcatcaaatgtctacaaaatgtaaccttatctcaactcattaactgaattttgcatacatacaaattccattacatttgcaaaaaatgtgtaagtttgtttttctcacttcatcagaattcagaattctcaagcatgcaccaggaacgaaaataactacttttcgccaactaattttgaaagcaatgttttctcttaattgtttcaaattactttacatttgaaaatatttaagatgagaagtagatgcattttaacatatgtgatggaatgtatcatggagcctccaaaattgagagaccctacagcctacccagggcttaaagcagccccgttagttactgggcagaaaggaatggggtgtggctgacaggtaatgtggatgatggtggtaataacagtgactcatattccttgcacacttaccatgtgtcctttatttcttacatcattttttaaaaattgagggctgggcgtggtggctcactcctgtaatcccaggcctttgggaggccgaggcgggcagatcatgaagtcaggagatcaaggccaccctggctaacacagtgaaaccccgtctctactaaaaatacaaaaaattagccgggtgtgatggcaggcgcctgtagtcccagctacttgggaggctaaggcaggagaatcgtttgaacctagggggcagaggttgcagtgagtcaagatcacacccctgcactccagcctgggcaacagagcaagactccatctcaaaaaaaaaaaaaaatttgaggtaaaactcacgtaacatacaagtaagtattttaaatgcacaatttagtgcattcacagtgttgggcagctaccacctatctctagtttccagtctttttcatcaccccagaaaaattccccataactgtcaaacaagaactctccactccttcctcccttcagcccctggaaaccaccaatctgctttctgtttctatagatgtgcctattctggacatttcatataaacagaatcatacaagtgactttctgtttctgacttctttcactttgcatgttttcaaggttcatccatgtcgtaacatatgtcagttcttccctcattttttggctgaataatattttgttgtgtgtattttgggctactatgaataattctgctgtgaacatttgtatacatgtttctgtatgggcttttttttttttttttttttttttttgagacagggtctcactctgtcacccaggctctggagtgcagtggtgcaatcatggctcactgcagccttgaactcctgggctcaagtgatcctcccaccttggcctcccaagctgctgggactacaggcatgtgccaccatacccagctaatttttgtattttttgtagagacaaggttttgccacgttgtccaggctggttttgaacccctgagccaagagatccacctgcctcagcttcccaaagagctgggattacagcctcgagccactactcccagccacattttgatttctcttaagtatacacactgggagtgagactgctggatcatatgataagtctgtgcttaactttttgaggaatgattcctttcatcttttcaacagcaatatgggaattggaaatcagtgtgatcatgtgcccaaggtgacactcccataagaggtggagtggaatttacagtcaagccattctgattcacagcccctgtccttgcactcagtcaagatgtctcgttagtgtacatgaaatagagacagtggtgggagctgagggctgcacgcagggcacaacaagaggtagaggctagcaagcgtaggatgtgctcaggtgcattcagaatcgaggactatgagggtggacaggggccagattcttgagaatcctgaaggacagcagagtaggaagccatggctccaaagtcaggcagccagaagtagatgggctttgaggaccaatggtgccagggtgtgtcattgggaccttctaggaactcaggtaaaaaatgatggccaagagtaggcaatgttagagagttcatcctcaggcacagacagggcaaagtgtgcagcaccgtggactgcctttgtgacttttatgattagattgagagaatcaccacctcttagcagagagagcaacaaacaatgcaaacaatgcaaacacagacacacaaagaaggagaaacaatagccctcatcaccacagccctagtggtggcagcaactaaggaaattatatagagaagttggaggagcctgtgcaaccagcaaacagaaatgttgtgaacccattgagatgtatggactttccctgacatgctaccaaaagtttgtcattttaggagccctgaagacttcttgaagatctgatgtgcaggcctagatctcaagcttatttatttttctgttcttcttcttgcatattaagatggatgcttttcttattaattttcagccttgccctttttccccaatatgtataaacaatttcaagctataaatgtgcttctaagttctgctttagctgcacgtcctctttctttctttctttcttttttttttgtgagatggaggcaggagtgcagtggcgtgatcttggctcactgcaacctctgcctcccaggttcatgccattctcctgcctcagcctcccaagtagctgggactacaggtgcccgccaccacacctggctaattttttgtattttttagtagagatgggtttcaccatgttagccaggatggtctcgatctcctgacctcatgatccacccacctcggcctcccaaagtgctgggattacaggcgtgagccaccgtgctcagcctcctttttcatatttagtattttcctaatcattcagttgtaaatattttaatgtccattatgatttcttcttccaccttttgttttgattatctattgctgcattccaaaaaaaaaaaattagcttaaaatgacaatcatttcattctatctcatgatattgtgggtcatgaattgggacaggcttcagctggatgattctcctgctcttctgaacattaactaagggaactagtgatcttcagctggtagatgggctggtctggagggtccaaggactttcactcacatgttggcatctgggtgcagatggctggatggcatgctcagtgagactgctggacagtggctacctctggcctctgcagcttggcaggctcaggatggttggaccaactcaaagcagctcagatccccagagagagaggaactggccagtctgggaattgaatctagaaattagcaaagcacaattccaccatagtctgttgcttgaagcaacacagaaaggtctcccagatcattggaaggcacacagctcctgctgctgaatgggaatagtggaaaaatatttctgatcattctttttggagtgaattgtgtcccccaaaaattcatatgttgaaatcccccagaacctcataacatgactttttgcaggtagggcctttatagaggtaattaaattaaaatggggtggttagggtgagctttagtccagcatgactggattagaagaggagtttctgacacagacacacaggcacaaagcccatgtgaggacagtgagaaggcagccatctgcaagccagagggaggcctcgcaaggaatcaagcctgtcgtcacctcaatcttagacctcttgcctctagaactgtgagaaaataagtctaatgtttaagtcacccagtctgtggcgttagttatggcagccctagcaaactaatacattatctttaatccatacattaatgaattcttcataattacctttctttttctttttctttttcgagatggactctcactctgtcgtccaggttggagtacagcggcgcgatctcggctcactacaatctctgcctcctgggttcaaatgattctcctgcctcagcctcctgaggagctaggattacaggtgtgcaccaccacgcctggctaatttttgtatttttagtagagacaaagtttccccatgttggtcaggctggtctcgaactcctgacctcatgatcagtccacctcggcctcccaaagtgttgggattaaaagcataagccaccacgcctggcccataattatctttgttaaacttcaatcacatgggtttctaatttaatagcatggcgactacagaatgtggtctgtcatgtatcaagcatttgaaattggttgaggcttccgttttagcctttatgtatgtgtaagatattggaaaatattcttggtaaaattgaccagaagatgtattctacagtcactgtttaagaaacaagtgaaaatggtggttaaaataaccaaaacaactaaacgtgtgtggaaataaacaaagactacccaaaggagagcaggcagaggcgatccattcagagcttgctgtagcataggagtcagacactgtcacttgtgtttggcagaaactcaaatcaggctgttgatcaagtttttatcatgagggcaggtttcaaggctgccattcatttttcactgatggtttactttgggcttaccaggaaaatcagtcactgttaaccaatcattggtttctatgtaaatcaaaatattaacaattgcccaagtgcagtagctcacaccttcaaccccagcactttgggagcctgaggcaaacaaatcgcttgagcccgggagttcaagagcagcctgggcaacatggcaaaccccacctctaaaaaaatacaaaaattagcctggcatagtggcatgcacctgtagtcccagcttctcgggaggttgaggtaagaggatggcttgagcctgggaggtcaaggctgtagtgagccatgttcatacgactgaactccagcctgggtggcaaagggagaccctgtcttaaaacaaacaacaacaaaaaacagtctctatttacataacataaagaagccctttggagaaggtagaaacagactttgctgccctctctgagcaaacattgtctcattaatcctccccacaacccaacaaggaggtttgacctactgagttccattttaggagataagaagccgttgtatgcctcagttggctacccagtctaggggcagtaagcccccacttgctataataggttgtgattgtctgatgtattaaactgaactttaaaaagtcatttctatttcgctacacagcagtggggcagcgcagaaacaaggaaattatatcttctgcttcgactgtttttcatttttactttgtgtttctagattctcaaacttccatcactctaacagattctcaaattagaggagaaaacaatcttactttacataaaaacaccaaattgatcctttatggatgcagtgtggtcaatgacagcatttgttttcccagcatagattgtgctgatgcattgtgtatgtggcctggtctgtagcctgtgtgattgacagatgattgagagacagagagagagagagattgtcaggaggcttaatgatcctcacaacacaactggggtaggtgctgtggcccccacattacagccgaggcccagagagagtcagtagctcacccaaggtcacacagcttgtgaacagcagagccataatttgatcaatgctgctaggctgcctgtcaaaatacacccaaaacaaaacttactttttgtatagcatgagcttttaattctatgggttgctgttgcattgaattatgccctagtgtaacacaaactaaaatatccagttgcaaaattaaataataaataaataatgggtctgcgtgctgtttatcagtccaaatgtggctgcattttttggccaactatgtcttttaagattacatcctaacattaagtttttgttggtttctaatcccagctttggcagttttggacaaaagctatgggcataatatcctcttggccctccaggcaggggcgctgcagattctgggctgggggtcagtgggggcagcttacaaaatgtttttctgtgagggcctcggctgaaatagaggggaacactgctgagctctggcctctgtgtctgtatcttgactgactttttaaatttttttttctgaaatttctgtgtggcctgacaagtccgagactaccacaaagtggccacaaaatttgtttaaatgttgtctgtcaagttggaaattttattttaaaattcatggtgcaatggcattataataaaccttatttttccttctgcagtctgtttctggatgctggcagtcattcagaaacatttgctgagcacctcgtacctgctgaatgaacccacgtgaaggggagccaggagtgcggatcattaaaaagcctgtactttctcagtccccatttgacaccacagagagaaaatgcatgctcctgatttgggtagatctagaatgttcttatgaatatggtaggtggagcaagggatccaggttcttatgatacatgataagaaaggccctagcttggtcagacacaaataaaagccaagcttttcatctaaactcccttgcaccatcacccccttaccaaccagtacagagagcttaacatctctataccagatagtgaatgtttctaataagaatggcaaattcttattgtgagagagataagggcattcaagtgttaattcaagagaaatatgtatatggttctttaaatgatttatttactaacagcattaagtatggtgtaaaggaatttacataccctaattctcgtctatatatttttttggattttaaaatgacaacttgtctaagttcgcattagtattaagccctaacatgagacagtatttatagcataagatttttgccacctatttttaattgtagcgctgttttatcaataagatcaattaaagagttgaacatttgaaaagaagaaacatgaaaatgaatttctaactgtacggtattgaatacatgaaagttctcttaaacttagtccagagtctcaataaacatggtaagtatgtaataattcacatttacaaccgccataaaaactctatcaaccaaattattttatgacgtcaaaattatctgaaaaaaattgaggaactaaaatttttaaaaataggttctcagttagagctgtctattaaaaggataaattttaaactctccggagctggccttcctggttccaggagcagcctgttggccttctctcgcaaagctcagttcctttcctccattccagaagaccctcaagcctgtcccatgcacctggttttacatttttaaatgttaaaaggaagaccaccgtgaaagattggcatgttaatagtaggctaaggcgacaggtgctggggctccggcttagagatccccacagattccatgctcccagggctggctgcagccatctgcccccacccacccccacccggcccagccctcccctcctggaggtggaatcgtggcttgcacaatcccctctgggcccctgggggaggcgcaccatattgattttttggacttcgtttctgtgtgtctcaccagtctttgcccggcacagtgactcactggcgtccctttcaggactttctcccgcctgataacatctaaatgactcatgcctacaccacctggagagctcagggaaggcacggtttgttcaggccaccctcactccaagggccagcccttttttggaatagaaactaaaagttggtagcttccatttgtagttccatctaacagaagagccgacccactcacattagctggctcacgactaaggcaaccaatgcctcccagaacatagactcaactggcaaccccggcactgaaggtcaaggtgagtcaaagacactcatgcagaagggtggatgctcttccaagtgtgactggctggcctgcacggctcactgcctcccctcctcccgtcaagatgcagcttcagtttaaaccaccttcgttccattcatcaaagaggaatatttactgttattgtaatgactcttctcacagtacacaaggctacacctgaaacacacaggcctttcagaaagcacaaaggagcattgtgcaagcccctgcccagtgagatggatgggggcgtagacacgccagttaacagccgggctttgcaggccagcaagacttatctgtggccgcaccatggccactgagcttgtacctttcttcttttaaaaattgctccttcattataagcagagttaaatacctgcacatgtgatttgtgttgaaataataaagcaacaaacacacatcaagctgaggagagaatcttggctaaggtaggaagtcgtgggtctggtctcagtctgtgctgctgaccaactgtaagaactcagaactcactgtccactcaggaccacagtgtctcatctgaaaggacgaggagactggaacacaccagagccatggttctcaatgtgtggtccagaggccctcgggggtccctgagcctctttctggggatctgtgaggtcaaaactactttcacaagtatggtttgcctttttcactctcactctctcatgcttgaacaatggaatcttctaaaggcttcctgacacgtgatgctacaatggatggaatccagaggtggataggagaagccagctgccttctattaaaccagaaatgaagaacatttgcagaaatgtacaacaatgccatgcttcccattaattattttgttcttgctttagaatatgtcacttttcattgaaaaatgttactcatgattttatgtaaaaggtttattgttgttacttttaaatacatattttaagtgttttttagttttgatttctaatatggcaaaaattggtaaaatcacatacacaagggcttttggggatcctcaaaactttttaagagtgtaaagggatccagagaccaaaagtttgataaccactaaccaaaaactttgacaaccatcatcttgaagggtccttggactttctggaatttggatctcccttgccttgttcagttttctctctttttagccatctcgtacttactgccatttcagttcctatgtacctgacttattaattatgcttattgtttaccatgtgtgttcccctcccatataaactccatgaggactgagatatttgtccatgatgttcatcagtgcatcccaggctgcctagaactgggcctggcccttagcaggcacttgtttttggatgggagggaggagaagggaggggagagggcaagttctttcagtgtctgtataatggacagagcaaggtgtaccacctcggtgtgatagaagagatggagacaggagaaaggaagctctgcacaggatcacgtggtaggtggcaaagtcagggctccatcacagcttctgttgtcacatgactctgttatctgaccctttaaggcagccccttctgctccaacagagcttcagggtaactgagtgccccgcaattggtgttagcagagaatctgtgtccagttgatccctaaaagtttgaggaacactcattccccagtgcataagttcctgataaatgacctcataaataaatgacctccctttgtaggaggttggctggaaggctcagatgcacatggctgctggaagtgaggtcctcccacaagagaaccaacacgtccttcaagggtctcggggtctgtgaacagacatggacatcaggattggttgaggggcttccaggttcaatcctggtggcacaggtgaggcccattcaccagaccagagtgtcgccagccatccatagcaggtgtgctctttgtggctgcctatggcttttagtcctgaaaagctcaggtttaagtagccaggagcacaacccaggccttgctgctgcttctggacatctctgggagtgaaaagggagttctatgctcagccacctgagtttgtggagctcgtttcaatctcagtctctcccatcagcctcctggtgactcctctaagaggtctcagtgcttccttcaccctcaatactcaaggccttggcgaaagggaattcttctgagacctgaagtgtagaatcacgagggagaaacagtcaagcaaaattgaccgttatcgcccaggagataagacccaggagtcagttcagagaacgcagacatgaccgtagaattgtgtacatagcaggccttgccctcagtggatatccaataaattgcaatggacatatgttttcttttctgcacactctcttgcctttcccttggctggatcttggggcttctgggagagtgatgcggaggggaatattggaagaagaggctgagagcacagatgaaagtcatcccatctgtttggatttcattttaagagcagtgcagaggcattgagtgtttttaggcagagaataacattaaggaacgtacaggtgtacttcggagatattgcaggctcagttccacactgcagcaataaagcaattatcgcaataaagtcatataaatatttcaggtttctcggttcatataaaagttatattcacactatattgtagtctatctagtgtgcaatagcattatgtctaaaaaacaatgtacataccttaatttaaaaatactttattgctagaaagtgctaataatcatctaagtctttgtcaagtcataatcttcttgttggtgggtggtctttctggatgtggatggctgctgaccaatcagggtggctgtggcaatttcttgaactgagacaacagtgaagtttgctgcattcattggcttttcccttcatgaaagatttctctagcatgcaatactgtttgatggcattttacctacagaacgtctttcaaaattggagtcaatcttctcaaactctgccactgctttatcaactatttatgcaatattctaaatcctttgttgtcgtttcaacaaagttcagagcatcttcagcaggagtagattccatctcaagaaaccactctctttgcttattcataataaacaactccttgtgtgtgaaagttttatcatgagattgcagcaattcagtcacgtcttccggctccacttctaattctagttttgttgcttttttttttttaccacatctgcagttatttcctccactgaagtcttgagcctctcaaagtcatccctgagggttagaatccacttcttccaaactcctgttattgttgatattttcacttcctaccatgaatcatgaatgttcttaacgacatctagaatgagaatcttttccagaaagttttcaatttactttgcccagttccatcagaggaactactctctatggcagctatagccttataaaatgtatttcctaaataagacttgaaagtcaaaattatcccctctatctgtggactgcagaatggatgttatattagcatacatgaaaacagcatttatctccttgtaaatctccatcagagctcttgggtaactaagtgcattgttaatattgaacgataatattttgaaaggaatagttttttctaagcagtagttttcaacagggggtttaagatatttagtaaaccatactataaacagatgtgctgtcagcgaggccttgttccatttctagagaacaggcagaatggatttagcataattcttaagggcccttaagattttcaaaatggtcagtgagcattggcttcaacttagttaccagcagcaccagccccaccaagagagtaagcctgtcctttaaatttttgaagtcagacattgacttctcctctctagctatgaaaatcttaggtagtatcttctaatacaaggttgtttcatctacactgaaaatctgtgatttagtgtagtcaccttcatcaatgatcttagctagatcttcaggataacttgccgcagcttctccatcagcatttgctgcttcaccctgcacttttacattctcgagatgacttctttttttaaatgtcatgaaccaatctctgcttatgcagcttcctcatacctctcaggcatcacagaattgaagagagttagggccttgctctggattaggctctggcttaagggaatgttgtggctggtttggtgttctatccagaccactcaaactctccgcgtcagcataaggctgtttcactttcttaccattcatgtgtttgctggagtagcatttttaatttacttgaagaactttctctttgcatccacaacttggctatttggcacaagaggcctggcttttggcctatcttggttttgacatgtcttcctcactcagcttaatcatttctagttttttatttaaagtgggatacgtgtgaccctttctttcacttgaacacttggaggccactgcaggcttattaactggcctaatttcaatattgttgtgcctcaaggaataaggaggtccaaggagagggagagagacagggaaatgcccagccagtggagcagtcagaatacatacacatttattgattccgttcactgttttctgtgggtacagtttgtggttccccaaaacgattataataataatatcaaggaccactgaccacagaccaccacaacagatagaataataataaatttgtgcaaataaataataaaaaaacattgtgaaaattaccaaaatgggacacagagataggaagtgagcccatgcctttggagacatggcaccagtggacctgctgtataccacaaccttcagtttataaagaacatggtatctgtaaagtacgataaggtaaagcacagtaaaacgaggtgtgccagtgttggggagcacatctggctgcctggcatagtattgactgaaagaaagataacagagggagggtatctgaaaagtaactgccagatgctatggtgcctgctcctttgcagtcagggagaagagaaagaagagactgattatcaaagaaatcccaaagctagaatccgcagacccccattccagattcattaaaagtggacaagagataggggagcctgaggattgtccctggttgactggaaggtcacccaggaggaaggggtgtacctcagagatggacagggatgggccttctgctcgtcctacaggcacccattctcagcacaggctcatccagccaaagactaaatttcccagcctcctttgcaactagatgatatcacgtgacaaaatccagaccaatgggcctgccatgtgcaattctgattagtgcccttaggaagatgagcctctgcttctctttcctcctttcctagggaggaatgcaaatgtggtagggagacatcttcaaccaggagaatgaggacacagcaaggtgggaggatcctaagtcccaaaactaccacaacatcaccaagccaacaaaccagcctagggtcaccttccccaagtgttatgggagtgaataataaacctctatttcttttttttttttttccttcgagacagggtcttgctctgtaacccaggctggagtgcagtggcacaatcttggctcactgcaacatccacctcccagcttcaagtaattctcatgcctcagcctcccaagttgctgggattataggtgcccgccaccacatcttgctaaattttgtaattttagtagagccagggttttgccaggttgcccaggctggtctcaaactcctgacctcaagtaatgcatctgccctggcttcccaaagtgctgggattacacaggagtgagccactgcacctggccaaacctctatttcatttaagcccctgtatgtgtggcctcctgttactgatgttattttcatgtgttattctacgcgaggggcagaacaacttgcttttgttgtatttcaagtgactgtatcgctgaaccaaccactctcggagccacacttcctctgcctacaggctctgtgttgacttgtggcatgaagaacacctgtgaggtatccacagcatacaccagcccagggacggaggccacatgggcctgagcctgcagctggcagtggcggacacagatgctccagcaggagtgaggggaaacactccaccaaatgaaggcctcagggtcattcggacctcgtggaaacaagttgtatcaggtttgctggcgaagcagctaggaggctgtggcagctgttatttattcttcagtaggacatttggcgcaatgtcttacatcttcatgggtaattagacaaaaagagctcaccacccctaggtgatgtcaatgcagagggagagtcctagtgacatactacgggcttggcctcagtcactgtttgttcaatgacttgcttatcagggttatatgtgggccaaagcagttactaatagaagagaccttggataacaaactcgagggtcataaagatctggagaggctggaatgatacactgaacctacacagactcattcattcctcccccatctgttcattcagtgaaagcatattcatcaacacccagaggacgccaggcactcaggaaggtgctgggacaccacaggtgaaaagggtccggttctcactgaccctgcgctttcgtatgtggagaaagacaatgaaatacaacagaccgaggcaggtggatcacctgaggtcaggagttcaagaccagcctggccaacaacgcaaaaccccgtctctactaaaaatacaaaaattagctgggcatggtggcacgtgcctgtaatcctagctacttgggaggctgaggcaggagaatcgcttgaacctgggaggcggaggttgcagtgagccgagattatactactgccctccagcctggggaggagagaaagactgtctcaaaaaaacaaaaacaaaaacaaaagacaaaaaaaaaacagataaagcaacaaaatcatttttggagagataatgctgggagcgcattattggcaggatgtgatagtgacatgaaagtaaggctctttccgcttgggatcggcaagaactgccctgagccagtgacatttgcccatttgcctcagatgatgaaaaggagccaggcttgagagccaggtggaaagaacgccagggagcagcgagtgcaaagtccccagggggcagcaacgggagttttccaggaacagacccaggcaggtacactggagtgtgaccagcaaagaggagaatgaggaagggggtggggaccaggtcacagagggcatggtgaggagttttggattctcttctctgcagggtgagaaaccttctgggaattttgaggagagaggtggcgtcataggattaacttctccaaaggctacattggctgctgtgtgcagggtggattctaggaggtagaacagaggagagctgggaggctcttgcatggtggtgatgaccagggcactagagaagagactgtgcttgagatgtgttctggaagcagagtccacggcatttgctgatggtttatgggagtaaaggaagaagagaaatccaggacaactccaggtcttttgctgagcaaccggtgggtggtggtaccggttcctgggacgagaagcccttttctccatctctgctaataactcgctggcctgagccagcctcgtcacttgcctttaatgctcctgtggtcacatggctggctgccctgctgccaccacgcctcttccccatggtctgggattgatcatgtgcagggcagcacctgaggtccacattaacactcccacacaccaacagatgagcttggaaggaagcccctgtgtggttcacacacaggaaataggcgggtggtcactgtgtgggactgtcttggatggcaggtcaatggcacatctctggtcgaggaggggaataaggacaccaggcaggggagatgcctgagttgaaggagtgagaccaaggcagaagcccacccagaggatgagggctgagggaaagagaaggttctcatgcacagtgaacaggaagcagggggctctccggacccggaagtgaccctgggccggccaggggacagaccagtctctactagaccatggggctggctctgggggtattttaggtctccaggttgatgtctgcaaggccagctttttttttttttttttttttttggagacaaggtcttgctctgttgcccaggctgcagtgcagtggctcaatgcaacctccacctcccaggctcaagcaattctcccacctcagcttcctgagtagctaggactacaggcacgcaccaccatgcctggctaattcttgcattttttgtaaaaatggggtctcaccatgttgttcgggctaaggccagctttttcttgctgatgcaggaagagggactggatcagactcaaatctgagaggccctggaggacccagctatgagaaactagcaatgaactagagcaggagggccaaaggcagcctgctggcttcttctcatttttccagcctctgacacctcacaccattatgaacatgtaattgacctgaatttgtaaattcttattcttttttttaatgatttctttcctgcatgaatggcagagggtgactcatccccagggacggggctcaacctttcaacatgaactcaccaccatgtaacgcgtgcggcccccactggctgaagccatttgataaatccctttttctcatttttacagagagaaggtctaagatccaagctacagcctaattcagccatttgccctttacccgagtttttcaatatactccacactttcttactcctgctgagagccccactttccttgaatgcattcctctcttggctccctccctgccgccggcctcctccctctctctcccttccaggtcacttctcgtgatgagattggacttgtttcctggggctctggtaacaagttagcttaaaacagagaaatggaccctttcacagttctggaggccagaagtctgaaatcaaggtgttggaagggccactctccctctgaagccccagtagaggatccttcgtggcctcttccagctccggggtccctgacaccccccggcttatgcccgcttctctcccctcactgcctccgtcctcacacggccatcttctcatctccttgtatctcttctctgtgtgtctcttataaggacacttgtcatttgactcaggacccagcaggataacccaggataatctcatcttgagatccatcacttactacaactgcaaagtcctttttttagatggaatttcgtgcttgtcacccaggctggagtgcaatggcacgatctaggctcgctgcaacctctgcatctgggttcaagtgattctcctgcctcagcctcctgagtagcagggattaaaggcacctgtcaccatacccgtctaatttttgtatgtttagtagagacggggtttcaccatgttggccagtctggtctcaaactcctgagctcagatgatctacccacctttgcctcccaaagtgcgtgagccaccgcacccagccagggctgctcttaaatgatgaaaccaatgggctctacagcctcaaatgctgagggtcaagctgtgtcctcttctgccaagaacaaggaagtggtatgtctgagtgatatgtcattgctcattgtctgccataaggttgggacaaagagcagaggtctgggcctggctctcagcttagccagccaggcccccgggccaggctgagtcactgtgtcctcactgcttaacccagggtagcagtgctcactctgcttattgcagggcaaggggcaatggagctgctatctgggaaacagtttgaaaactgtgaagggctccacaggtaaagtgccattctgtttgttttagtggggaatcactctaggaaaaaattaggaggattttggtcctgaatcctctagaagtgtgctctgcgactttgggcaaattatttaaactgaagatagtaatgctactcaaaatcagtagtgtcacagacgtgtccacctaggaaaggtataaagtactatataaatgtgaggttctatcattattatagtgtttaccatttcagcaaagtattgtaaaagacattacataatgcatttgcatctttttactgataaaacttctactgtaagcattagtacttactaaccagcattttacattttcctttgaaagggcgaaattccttccgcagaattaaatcgtgtaatttttccaacagatatttattgagtgctgtgcatcaggatttattctaagcattgcaggaaagtagtgaacaaagcagatataattccttccctaatggggtggaatttgtgctgtggagacagagaattattaaggtaaaaaagcaaaagataaagaacgtaacgataagggcttaagaaaaaaaaactcattcggtgtcagaaaggagttgttgaaattttaggtggggtggccagggaaggcttcaccaaaggtgactatttagtaaagatctggcagcggtgacagtaggagtcacacggactcctgggaagacccttctagggagagggaacagctcaggagggagttggcctggtgcccagagcaggaactgaacatggaggcagagactcagtcatgtaactgctggaggctgagtctcagggcctccaggggcgtggcgggcttgggctcaggcctttcttctgagtcacacaagagctgttggagggttttacctgaggacggacaggctgactgccgtttaaacaggatccctctggctgctgtgttgagaatgggtatcacgtttagaagccttttgaaataagtatttgaatgcacaagtcatactgaaagtcattttttaaatgtcaaatgcttgccttttcccctaaactagagcaggtcattcttgcagtgaaatagtccactcacttttctatagtaggatgaaaagaaagaaacgagaaggcacgacttgctgtatctagtcaaacattcttgctaccaagaaacattcacgctccgagtggagaaggggctgcctgcatctcgtgccctctgggtgagcccggctatgtcttccttcaccaccctctgctgggagggtgggagctgaggggacaaggacacctgagagaggcctgtgatgggctgcccagtgccacccaagcccctactgcacatcttccgccccagcccaggttggtccagaaaaagaacatcaagtgttgttacccaattctggtgtcaaagacaccctaagagtcctccattgctactgaccagcagtttcacatgtacctacaaacagaaatggggtaattgggtttaataaaaaaaaaaaatacattggccataaaaaggaatgaagttcatccatgcagtacatgctacagcacaaaagaaccttgagaatattatgttcagtgaaagaaggcagtcacgaatgaccacatattgtatgattccattcttatgaagtgtccagaacacttcataaatcataaggcaaatccatagtatcggaaggtagatccatggttgcttagggttgggggtcggagggataatggggtgatagctaatcaaaacagctttgtttttgaggtgatgaaaatgttctaaaagggacttcgataatggttgtacttacctgtgaatattcttttttttaaatattcttttttttttttgagacatagtctaactcactctgtcacctaggctggagggcagtggcacgatcttggctcactgcaacccctgcctcccgggctaaagcgattctcctgcctcagcctcttgagttgctgggattacaggcatgcactaccacacccagctaatttttgtatttttagtagagatgggatttcatcatgttggccaggctggtctcaaactcctgacctcaagtgatctgcccgcctcagcctcccaaagtgctaggatcaatggtgtgagcccaaaggtgtgagcccaaaggtgtaagccaccgtgcctggtccttacctatgaatattctaaaaaccgttggattgtatagtctaaatgggttgctatggtctgaatgcatgtgtcccctcaaaattcctatgttgaaacctaacccccgaggtgatggtgttgaggtgggacctttaggagataacagatcatgatggtggggtcctcatgaatgggattcgtgcccttatgaatcaggcctgaggagccctttatcccttctgccatgtgaggacacagcaagaaacagagagcctcaccagacactgaatctgctggtgccttgatcttggacctcccagcctcccaaactatgagaaacaaatttctgttgtttacaaattccccagtcaaatgtattttgtcatagcaggagaagtggactaagacatggatcaattttatggtgagttatacgtcagtaaaggtgtttctataggtgtctgtcacacacatatgcatacatagatgcacaaacacacaaatacaatgctcttttgtgacttctaaaaaagtttaatcacaaatggaagtatttacactcagccaggagaatctgtaaacatgccctttcaattccattgtcaaacaagaaagaatggtttcaaggcactgagacagagtgagtacgacatggaaacccaaccctaccttgggagcaggggctgacaacccaccactaggatgtaccctgtgtatctgtagtgctggctccctgcacacagggcaaggtcccgtccaggaccatctgcagaatttgcaaggcccagtgcaaaatgaaaatgggcctcttatgcaaaacttattacaaatttcaagatggtgaccacaaagaattaagccaagtgtttctttacgcttttaagaggtatttccttgctagaactggggcaactcccatggcgttcagtgagaatcttccagaagatgagggctggtgtcctatgccttaagagctaagagtggaggtgctggccctcctctggttcttcaacctgcaccaaaggggcatgtcccaggtggtgaccactggaatttagaggtaaaggcagcatttgcctggagcagagaacacgaggtgaggcgggatgactctacaccacagccatagataagaggtactaatagctcagtcggtctgaaagagacacacttaaagtcataaatgggaagacgtgggtggaaagtcttgcagcaattggaaagccattccaccaaagacgtgttataacttaaaaatattccaacttctgaatgatttctttatacacctgcttaagtcggtgacattattcagccttaacactttaatccaagttttattttgtcaccaaaatgtgagttaagctaacttaatcatttgctagactgactggcacaggaatgactaactcttggtttgtgtgaagactagtggttcagttttctagttagcaaaatacataagccgatgcactgaggattattcagttccatgcatactgttggaatcattttgtgattcagacaaaaacacacaactataaaatcatatatctgtacacgtctgactcagttcagacacatttatttagggattatcagttttacagaatacaacgggtcgctattactattttggttgttcagacttgcctaaagcacgtcactgtgcagtttgatatcatggtggattttcaagcggtttataccctcccagagtactgccttataagggaaaatgactgtgtcagggtggcagtgtgctggacgagggggcaggaggcctggagtgtggccccagctttgccaggaaataggcatttgaccctgggcaaggaattgatcctccctgggtctcagtttctgcatcttacaaaccagagttggtctgagccatcagctctctgaagttttttccagttttaaaatccaatgtttcattttctcgtttctgaccaccaaaggcaagaaaaacatagtcaaagacaccatggttcccattgacagcactgggattgattttataccttgttgtcaaccaaaagtgccagtgcagggcagcagtgatcagcgatgcccgcaggagaccaagacttccagggccaggggacctgctacttatttatcacacacttaatgacacgccagacactgttctaagtgcttgggagacattaacagagggaggccccgaggggcccacaggtggcctgctagggaatggctgggcgggatttgaccccaggcagtctgggcccacaggctgcccttcagaggtgaagacggtagccctagctgggtaaccatgtcttcatgcccacagggagtgcaagggacaaaggaggctgacaaggagcagaaggaattagaaaggagcattagcaacgtttttgaccaccagcagaataccctatctgccattccaaggaatctcacagaaaagactagacactggccaactcttgcataatctgggtccaccctgatggagcaggaggcagctccacggccccacatctgcctaggattcttggtagctgggccagcctgcaaatgggcaaggttggttggattcggaggtgggcggaagtgtgggttaagcttatcaagtccttgaccccaacatatatcagtgaaatagccaccactgccagacaccccagcaggccagatgcaggcggcagcttacacatgaggaaatgatttctatctctaggttcattcttttcttcctccactccttaccaaagtctcactgtgcatgtgattttaactgaactgtgcacttcacttttacttcttgagggcgggaactaactaagccttaatcatatttgtcttctcagcatctgactctgtgtttgctaagtgaatgaatgatgcacttcggaccaaatgacgtctgtttaacttgcaactggaaaccaccacaaactgcctgttgactactgatttggattttaaggtaaatacagacatgtttctaaggagacgtttttgtgtgtgttttttttcaaaggatgacttcgtaagctagctaatcatttctcataattatgtctggattctaaagaattctttttctgcattttactctctagatatttcatgttcgtaacacatatattctactgtaatatcccttttcctcctctcttctgtgaatgtccctctttcttaaggggaaagtgttaacattgctcataactcagtctgccatagcgcatctgatcactccaccctgtgcaccttctgacttttaatttccttccaacaccctcgacttttgatctccaagcacaagggctatacttttatttattaggtttaatttactgtaaagctcattgttccctgtgaatcgcacgataacagtcaatgaataatcactggcttcagccagactgctttttaattctgctgagtaactggcaagccaactagtattaaggacaaaaatgtaaggaaccctgatattgccccagaactaggataagccattttattatgaacatgtgactgccctcgtgcagaggtggatcagctacagggcaggacccagggcaagggggctgcttggggcagcctcagactctttggaaggggaaatagggaggaccagggacctgggtgggaggcaggagcttaggcttacgatgaccccagcacacaggcccagcttcctcttcccacagcctccctgccgtcttagctctgccatttggtcttccggccgggatccctttcccaaggctttcacacatttaaacccgcgaggggcaggactttttttttttttttcgtgtatatgatagttttttcaaaatgttttctataaaatcctccctgaggagagcttggaaaaagattcttaatagctagatcattttgagtccttctctaccatgtactcaacactctaacatattctgcacatttggttctatgtcatttgccatagtcttaaggacgtaggttccataatcatcccttattctgtagaggaggcccaaggttagtgagcagaggaaggttccactgtcgggaaccggtggtcttcaaactcctgtgctcctcttttgatatctttctgctcatatatgttggaaacagcccagcatgagcaaagcaccacctcctagcccccagcctgtgccagccctgcaaagaggaaatatggctccactcagggagcccatcagcgactcagggagccctggagcacctggcactcagcacccatgaacacgagggcaggcatggtgggacaaggcagtctgcttggggcaagtgagcttcgggaagtagctgagctttggggagcagctgtctatacccagcttctcagggctgtgcaagtagcctgagggagaaagaccctatattagctgaaactgcagcccagatgagtcagtattttctgctacggttttttaaaaaaatagtaacatactcatgtctccatggtaacttactatggatctgtattccatttatggaactctttcttgacctatctgtgttctctaatctgggcctgaatatacactgagaagccatcagaatcaattcagtctccaagaaataatcacttcccctatacgtgattgtttcagccgtatagattctgactgtgactcatgccacggtgatacccggagaccttcggggacccagaaacattaaggtgcaccgatatctcaattatccggataactctagacctagagtcaccatggaaacctagaaccctgagtcacagagaagctgggccattcctctcccttcccggtggtgccgcagttcttgagatgtgagcagctttcagccccgtggcctcgcctaagctggggtttcctatttcatccacaacttcaggaatctaaactttcctgcaaaatattgagcatgtgacctgagtccaaacagccatggactcaagcaccttctgataaaaacggaaaccacagtgtagggggtggttttgaccagggtttcggagtcagataaactcaggtttccaccttgaatttctcatcaatctgacgtggcaggttattcatcctaaggttcagttcccacctgtgtaaagtgggagccgcaagtcctccgagagtgacgatgatgtgcgtggagtgcccagcccagattgaagcgcggccaaggcgggtcgctatctgggcaccgctcagctccagagggcgccactcccgcggagcctgcgggatcggggcttcccgggagcagcgcgatcagcaccacgactcggggacacagccagggcccggtttctacaggaagcgcctcatttggagcctttttgtgatagaatgatcattagtcctaagcccattcagaggttcaagaatggggtcggctcaatttcagggccttattacccaagcccggctgcccttcggtgccaccagcaccactgctccgtcgctgcggaattccaaaggcaggtttggcgttagggccttggccccagagaggacgccgagcgctccacggaaagtctccgcccggctcccagggcgcacactcgcgcgcacgtggggccgaggccctgctcccggggcctcagggccagccggcgagggacccagccgagtgacagcaggaggcggagggaaggttgggccggaaggtgtcagccccgccccgcgctccctcgccgcctccgccctcctcttctctcccctcgtgcgttccctctcctctccctccgctcccccaaccctcctgctgcccccttccctctcctcccgcttctccccatcctgcctacctcccttcccctcctcttctctctcctccccttccctcccctctctcttctctcctccctcgtttcctcccctcccctccactcggccgtccctccttcctcctccctcctccctcctcctcccgctcctgaagagcgcgccgcgtgggggacggcccggttacttcctccagagactgacgagtgcggtgtcgctccagctcagagctcccggagccgcccggccagcgtccggcctccctgatcgtctctggccggcgccctcgccctcgcccggcgcgcaccgagcagccgcgggcgccgagcagccaccgtcccgaccaagcgccggccctgcccgcagcggcagggtaagagctgggcccgcagagagcgcccggcgcgcggctccagtcccatggagggtcacccggggcctgggcgggggtcgcggggggcactgacacgcagatctcggggcgctgccgggggtgcaggtgggggtggcggctgctgcgaggactctaggggcgcgcgtctgagttccgcgccggctcgttttccggttatggagtggcctccggggctggcggggtcggccggggggttcctgcgtgctagggccgctgtcttcggggtcgcctagcggcgggcgcggccagggcgcgctggcttgtttcgctcgcttttgtttttaaaaggaaacgcaggcctggtagggggtcctgcccagtggatgtcccggcgaacatgatttcgcgaacgggagtgggggcacaggagagcgtgtccgaggtggcctggcgccccggctttgagggtgacttcctggagcggcgccgggcccggaggatctggggcgcccaagacacctgaaggctgcggcaccgcgggaacctgcggggcgcggggtgccatggtcacctgctcgccgcgtccagggcccgggctggggacccctcggtcgtgcgaggagagcgtggggaacctgtcggaaatgagatctggttgcgctgggctgcctttattttctcgttcctacagcatttgaatgaagaggtaactgagtgtttgcttgtgtgtgtttgggttgcgtgtgtgttatcctattttattttttacggcaggagaccttttatgttagcctgtacacaatttcagggtagcctaaaacagtagttgacgcgctagttatttagaaagtaaagaaatgagcagtcccctttggagacaggagtaatttattttaattcgccagtaagagattatatttgttccatacaatggaagcgcctgtgcgttatctgcctgcccacaccaccaccaatcagagagataaatctccacgttaagctttattaaaattctgagtagtagcgcagcacagtaaatgttagcaccgaccatccgcagggaaatgctcagatactcatttctgggattagtcattcatctctctaaactgatcgctttcaaagcgaaaaaagcaaactaccttcaaatgtgtgttacaaggttgtgttgtttcttttttttgtttgttttcaaatttatctaaataatcttacataagtgattacttgttccaataagggtactgttgtcaggcaaattctccttgtttttaaatgtaaccattctcagctgttacatttctgctctttatccttttttttttttttttttggtttaaaagcagcgatccatcagcaacaccaaacttgaaattgatttatgtggaaaaacttggcttgtctgccatctaacaagccctgttgagtaaaataagcaagcttaaatttgattagttgtgtgtctgcctgaaaccatttagtagagcactttaattctgcatggtttttacaaaactcattaaaagctggacaacaaaagaattctattctgtagctagtaattacagctctttatgtgggagtggtaggctgccttttctcctggtatttgtacacaaaagctggggagagcttttccactgccttccacattcattctctgtccatctcagagaagctgaaaaacagaatcaagtcagcaagcagtctgcaagcctaaggaagaaaaagagctgacccatccggctctggatggataactggcaacacccaagatgtctatgattttggccttctgtttgaggcttgtttatttctttaatcagcagctaccaggacttatttcatgcagagaaatgacataaagctctagaggaaggagcatttcacattggaaggagtagtgagaagggcctgatctgataatatcaggatgggtgggaagggtccattcctcatcattcatgttctcccggcacagaggactgtgtggaggactcaggatttaggaccatactcaactggggtttgatctccactttgccctgcggtggcccctctggtagctatgtggatcctgggcagattgtccatgttgctgggcctccgttgcttcactgtatgacgtctgcctctcagggatgcaggaagattcaattaggtaggagtggatggtcccccagcacggggcttagctcttagtaactaggcattctggcaatggcagccatcaataggagagactattgattgttgagtgaatataagtggcataatccaccaagtggagattctgagtgaatgtggccactttggacccaagactgctgcccctctctgtcctctcataggactattatttattgccagtgctgaccagcctttgttggctaccatgatcattacctgcactccgagtgttttaacagaattttctgatgcctctggcctcacctgctgccttttagccaagaggggtgtgtgtgtatgtgtgtgtgtgtgtgtgtgtgtgtgttgggtgtgtgttgggtagcagggttcttggaaggtctggtttagccataatgttgatcataaagagaaaacaagaaaataaatgcaaattaaatagttcggtgagcctttgttatttcgccacatccagtaagttctatcagttgaatgttgtctgaattacttaaaaagttctcagttgtaaacaggtaagagcacccagtggaggccatggagctaggcttagagctttgccaccagccttcagttccatagccatgaacctgggagggcaaggaatcaccctagaggtgaaggccattcatcggtgctaacccaaggtctctgaaaatgagttttagttactctattatctaagtatctttcttactgatatgtaacttacctggctgaacaattacattttagagctccaaataaattttcagcctattatgtcattgtccaattacaagcctcattgtaatagccatgttaaaaacaataaagccggtgaaattgatttcagtgtatttcaaattaacctaatatattcgaaatattatgtatgtataaaaattattgagcttttttcttttttccactaagtctttgagagctagtgtgtatgtgtggatttgtactagccactggttgagagctctgtagccacacatggcaagtgggtaccatattgcttagcccaggcctagtagaagattaagactcagtcagaggaagtaaggcagatccgtgcttggaatcagttcctcttgaagaagtgcacagccaagcaacacacaaagcagaaatattttgagctctgtattcaaagcaggaagatctgggaccatgtaagggggtttggtcttcagttctccctttgatcccttccctgggtgtgtgctttcttacagcctggagagtggaagggaagagagggggcttcctggactcctttcctgtctctagaaatgacccctgcagctgtcctgaagctctcaggttaagctgattgtgtccagagcagacaggaggcggcccactgccccactgtacccacccaagcactcacctaagctggccatggaaatgtgaatgaaaagcctgacccaggccctcttgccctgctaacccagcaaggaggctctgaccagccagccagcaagtgactttttctgtgacatctaagtggaattcagtgaggaatcagcattattattcaatcactgaaacagcatatcccattgtgatactgagaaatgctttcctcttgagacctttgggaggacagccatttaaacaagaattccctgcattcacttttgaattacctgttagctgtagaactcagccaggatcaagtcttgatgccaccaatgatgagtttagtgtacttaatcttttgcctctttgactttttttttttcttttttaagatgaatgatttcggaatcaagaatatggaccaggtagcccctgtggctaacagttacagagggacactcaaggtgagtgggcaagtcttaatttttttttttaattggaaaactcgatctctaggaggaaagaaaaaaaaggcctgggtcccagaaaactggttgtagccctagcttcttaatttattggccatgtgactatagactatttgcttacttgctctggtcctcagttttctggtctgcagaatgggtatcttgatgtgtgttgttcttctcctccacgatatgaaaccaaaggcctttatagcttgttttctgaggctccttccaggtgaaaatcctataactcccaataaaacagctggagaggctgtctctactgccttttctgtctacccaggagtttccttggttgatgggaagctgtttaagaactgaaatgagagagaagaggcagacagacccaaccgctacagctcctatcagaaagggcagcgcccgtggaattgtaggtagcctgttactggctcagagaacaagcaggcctacttatgttaaaccaaaaaccagatgaaaaatgaaagcgccctctctgctgcataaacattttatgtagcttctatcatcattccttttgggaacattctttagtagcacaaactggtaatctcccacttgtcttctccaaatatgacagcaagatttgattgttttcagtattatgtagtaaacatgtttcagaagcatgattttaaaattggcctcctcaaagtttagcgtcttgcataatgatgatgtacgtctctggcatattacattttcctttgtatatcattattgaggttatttgtctgatatgacccaaagaggcaaaactcagcacagtcctttctgcagtattctaaaggtcatcaaacttcagcctagtgagtctgcttgtttgatttggccggacattttaagcatggcagaagtggtacaagaaatcatggtattaagttgaaaccacaccccttagaaaaatccttctattaattcaaataatttgacgatgcttatgcggtttctgaaaagaagcagtcgttgctgaaattgatgtgttgaaataggaagcacagatttgtattgtcttttggcttcctggctttaaaaaaaaaaaaaaagaatttacggttaggaaaggcatttcttagtcacctgggcaatgcttgtgggaactttaaaagtttattggaggtttcaccaaaattagctctgctctaaagtagtttgtaaatccagatgagtaatttgcacttgcctgattgatcggttttcctcgtagatctcaggcagttggtcatcattgacttggatttttttgggctgggctccagcctctgcctgccctcttttgtaatgcgtcattcattgttctgcatttctaaaaagaaagcgggtaaccgattttatttgtaaatgtgttacacattttcttattgatgactcaacagatgggtcattgtattacacataacatgggatttccagcttatgttggaaaaatatagtctttcttcacgtgttcctcaacaatttaggcgatgatgaatccagatattatcggttactttcaaatgagtcttacattaaaaggtatttctttcataaatgttatgtaagatgctcagaaatcgagttagtgtaaggttttatctttctgtgtgtctcttcttttctgcagatagtttagtttaactttaaacctatttcctttggaaatctttccccttagtaggtgatttgggttttttttgttttgttttatttgttttttcgtttttggttttaagcaacagggtccttctctgttgcccaggcgggagtacagtggcttgatcgtagttcaccgcagacttgaactcctgggctcaagtgatcctctggcctcaacctcataaagcactggggttacaggcataagccaccccgcctggcctgggggcggggagggggttcatttttaagacactttacttgttataaaatgaaacgttaaggaattttgtcatgtattactattttccaaaccattggaattgatgtggaaaagcatctctagtttcagttaaattgtttcatggcaaacatttcaaaataaatgcttccaaagataaagtagtgtatttcattgtttgatttttcagtgtttatcgggtcatttgccttttaactgcattgtgctcagacggccttgtcaagggtcatttttcttacacacacagcctagttgaatttttctcaatgtaacaggagggtcaggtgtttggtaaaggggtctctgaggctcctctcgacaccattgtaagattctgttattttcagatttgtgtatttaatatattaacttaagtggattaggccactaaaacaaattcccagtcactccgactctgtgaggttacttaaataaatccacagtggccgggcaccgtggctcacgcctgtaatcccagcactttgggaggccaaggcgggtggattacacgaggtcaggagtttgagaccagcctggccaacatggtgaaaccctgtctgtactaaaaatgcaaaaattatccaggcgtggtggtgggcgcctgtagtcccagctactcgggaggctgaggcaggagaatcgcttgaacccaggagggggaggttgcagtgagccaagattgcaccactgcactctggcctgtgtgacagagtaagacctgtctcaaaataataataataataatccacagtaaaatacaatcatttcagtcactttgaccattttacgagtctgttttaaggactgactggttgattccatgtttgcttcaaaattgccagtttaatcagggactattggtaggattgcccacagaccacttttacaacaggtaattcaatcagtttaaatattgtatttccattttttttccatctgtttttgcagcgccagccagcctttgacacctttgatgggtccctgtttgctgtttttccttctctaaatgaagagcaaacactgcaagaagtgccaacaggcttggattccatttctcatggtaattggttcctcagacttgacaaattgtgcatgattttcctaagtagttcagttaataaagagatgacagttcctaagtgagaaatgttggtatctggaatctttgatatgaatagccagaagttctggacctgggagaaggcagtttttcatttgtatcaacttggtgattctgatgtggattctgatgtcttgagtgccagacgccccccagtgagccgctgttaggaaactgcaggggaacccctgagctgcccctcctggatgttttcaacattggcaagcaggtcctcatctccctgctctgccctggaaaacagacagaagagtagacattaaaacacacccaaacttgtaatttgggtttgcatcattagttaaatcatctcccctgccctgagttttggggcaacaaattgttctttgtaatccttacccatcggtagttctttctgtagttcttcgtgtcattgtttattcttcttaaaggaatagcacgtcagataatgttcatacaattactgtgacagagctattagttggaaacatgccagagatgactgtgtcatgtgaagtaggtgctgagaatacaggccagaaaattaattaaaacgcatacactggcgtaagcataaccctgcatggcagccatttatcattcttgaaattgctgagggtgtctggagaagattgtttttcaataaaaatggaaggtgtggttccattaccgtgctaagtgcggcacattcatatcacactcacttctcagctctacgcctagtttaatggaagtgacttccaaatgatacagtcccttcagccttttgaccagaaaccatgcaactgttttcattgcctacaattttaaaatagacttagcagttttccctacgcacaactgctttgtgacgctttgcaaaatagaatcaaatctgagttttattttagatttttttaataagtatagttctgagatatatattttctcaattatagtcagaaaagttttttgttaatagttacactgttttaaggaatcatgccaaggtttgagatcaaaattgttcttttccaaaaactaagatgtctctcctaaatctccacctgatatcaccaacttgaagtcctaatgtccccatggggggtttccttccagactccgccaactgtgaattgcctttgttaaccccgtgcagcaaggctgtgatgagtcaagccttaaaagctaccttcagtggcttcaaaaaggaacagcggcgcctgggcattccaaagagtaagtactgctttcctgagcctgcactgggtgagaagaaccaacttcagtgcagttgtttgatcttgacttgtttattaagcttttgcttggggtattctgcaaagagtagcatggatgtcgttaacctgagccagtttctgtttcaccccaatcaacccaagacttgatccagaactcattaaatatgtagtagaaggacgcattactggtgtcttgaaatgtgcctgggtcgtgtcagaatggtgacgtgtcatcatggtatcttgctcattcgtgggttctggtgtatgtcggtacttggtgcataaattagggatgacagtggtctcactacctttccactgtttttacctcatgtgttccattttttcttctctcctggtagacccctggctgtggagtgagcaacaggtatgccagtggcttctctgggccaccaatgagttcagtctggtgaacgtgaatctgcagaggttcggcatgaatggccagatgctgtgtaaccttggcaaggaacgctttctggagctggcacctgactttgtgggtgacattctctgggaacatctggagcaaatgatcaaaggtaccagctgaacgtcttacttctccttgtccaggatgagctgtggccgggaagactgattgggaaagtcacgtgggtgttcttcaaccttagggttgccacttgaaatgacatagagtaccttgcctcaaaatgccactcaagtgagtcagatatatggcagtgattatagatttttatcccactttatgtgagtgtgtgtgtgtgtgtgtgtgtgtgtgtatagcatcaagtatagccacaaggtagtagccttagtcactaaattgtttgctattgctggctgtattcatcacgggagtccatgttgactcagatatgtaggacagcaagaattcccacgtcttctgagctcaccttacagagctaagagatatggcagccttaatgaaaggggggagcctttactcacataaaccctgtgaattctactgtaaattttcctacatccaaatggaatgtattttggatgttgaggattgttgagggggcggggtctgtttttaaacaagtgagaaattgatatatatttacacgctatcatattgtacagaaactggccattgatcagtagaaatctcaccaaatacagagaaagtcttgattcaaaacttaaaatagcagggagaccaatgtttaaaacatgttgagttaaaaaagaaaagagggccaggtgcggtggctcacacctgtaatcccagcactttgggaggcggaggcgggcagattacttgaggttaggagttcaagaccagcctagccaatatggtgaaaccctgtctctactaaaaatacaaaaaataaaaatattagctgggcatagtggcacatgcctgtaatcccagatactcggaagcctgaggcaggagaatcccttgagcccgggaggcagaggttgcagtgagtcgagatcacaccactgcactccagcctgtgggagtgagactctgttgaaaggaaggaaggaaggaaggaaggaaggaaggaaggaaggaaggaaggaaggaaggaaggaaggaaggaaggaaggagggagggagggaaggaaggaaggaaagaaagagggagggagggaggggagggagggagggagggagggaggggagggagggagggagggagggagggaaagaaataaaatacagtagggattatttaggttaaaaaaatataagaaaataagcatgtttatagaattcagggaactagtcctcacctgactgattttaaacacactgaatttcagcatcaactgtagactcagaatctcgaaaacacctaggattcaacagctaactttttttagttacggcgtctgagggccagggaaactcatttttaaagaccctcatttcttctgaacttggacagggcttttctaccaagtttctggtgatctgtttattggcaaattgggcctgttttaccattcctcgggcctgtgagtttgtgtgtatttgggtttccgggtggacgtgcactttgtaatatattcgtagtaagtatgcatacacagtgcacaaaccttttccctttcaaagttcttgggcacatgtgttccccatcccagactcccacagccctggagacttcccacaccctggggaagcgtgcaggtttggaagcagtggaactgtaagcttcacgggggcagacaccatccattttattaatttcctgtatgcagcctctggtacagatggcatttcataaatacttaactgtttcttgaatgcatgaatgaattcaatacaccatctggaccttttgcgatagaaaatttagtgttgccaatgacatcattcattttggaaaatttattttagtaattggaaaaatgggttgctttctctcgttttttgaaaaagacaggcagggacgtggagcaccatgagattaaatgtgaagcactccgtgcatctcatcattctaaaattatcatctcacaggaattcagaaagtcaatttgttctgtgtagttttcacctacatctgccatcttacgtctcctgtgtctgcttttcagaaaaccaagaaaagacagaagatcaatatgaagaaaattcacacctcacctccgttcctcattggattaacagcaatacattaggtcagtccgattgattctgcccttaagaactttgtcttcagtcttcccagtagacttggaatctctctactgtaggctcctaaggggccacctagacctgtgtgtctcttatggtggccacacgtgggtgttgagctataagccattgaaatgtgactggtccacatcgagatgtgtaggaagagtatagtcatgcacaccagatttggaagtcttagtatgaaacagagaatataaaatgtctccctgataatttttaatgtattgattacatattgaaatgataattgctatatgaggccaagtaaaataagaaaattaacttcacctgtttctttttgcttttttaatatggccactagaactttcgcagttgcttaagtggctcacacgatcttccataggtcagcactgttagtgctagtccaggcaattcttagagcaaggagcagaacgaagtgagctgattaccgcagtcaccagtaatgttggtttagtgtagcaaacaagaggcggcaggcacagagtgcgtgaaaagcaatttgtaaactggctctgaacttgggagcttaaagagctgtcatggaatctgggtcctttcttctggttgctgatactggggagggcacagggtctggccaggccagcgagggaggggtcctcggaacagcaggcttgggtggtgttggtccggcccagtgttttctctctggccccagctccaccattcagacccggtgaagcccacctctctgccccactgggggcttcctgctcaggaggtctttctgaacatgacagtgggacaccctgtgcctgcctgaacctgaatcagagtcagagagcttccttccctctccagaaaataaattattctgcaatgaacagagacaggagcggtgtgatgaaggagcagaaagcagagtgggctgtgcctcagcacacagggttcatggcctggttctgcccttatgaatcacacagtacatgacacgtcacttggtctgtctgagccttactctcctcggaagctaaaagagccagtgagccctgtcttcctgaaggtcccatgaaagcactagggttgtagaaataggaacattgagtcctgcctgcagaggctgcagtcattttggcagagggctgctggttgagaagctgaatggtttgagaagaaggcctggtgacagacccccaccaaagcccgggtctccactgaggttctgcagagggctggagtgtgcggagtgctcacctgtcatttgctcgtaggggttagttactggggtaacactgactttaagagctctgccgtccgattgttctgttccaggttttggcacagagcaggcgccctatggaatgcagacacagaattaccccaaaggcggcctcctggacagcatgtgtccggcctccacacccagcgtactcagctctgagcaggagtttcagatgttccccaagtctcggctcagctccgtcagcgtcacctactgctctgtcagtcaggacttcccaggcagcaacttgaatttgctcaccaacaattctggtaagattggaagcatctttcaacaaggctgttgctttgattctgagaaccccagagccataatgaacctcttaataaatacttcctggattcagccattagagaagggggtcaaagcccatgttctaagtggatttccaacaagcatacccctaatatgtttcaggcactggcccaggtactgcaggcattgagtaaacaaaacagtccctgctcttacagccagatttctccacactttgggatatttatggaggcgatgcaggaatgtgacatttcttcttatggagatgtaacataaatacagtgcacaagtctcaggtcatgtggctggttggatttgtgtatgtatgtatacccatgtaataaccatccagatggagatagagaagtttccagtagcctggaagattccttcgtaccccttcccatcaataatgtccccccgacagaagggaacgattctgacttttatcattacggattaggttttgattttcttgaactttacatagatggaatcataaggcatgttttcttttgtgtttgtcttttactcatcatgtctgggattcatgcatgttgttggatgtagcagccatgtgttctttttcatcgctgtatagtattccattataagaattttattcattctactgttgatggaagataggatttgtgtagtatagttaccctaaggaataagcacctgagtagagagcattttgagaagtctgagtggttctacaccagcaggtgcatgattgcactggtagtggttggtgatgctatggtcgtgcccaagaccaactgtgtcctggaggaatcaaagtatgtgtttggttgtctttgccagggactcccaaagaccacgactcccctgagaacggtgcggacagcttcgagagctcagactccctcctccagtcctggaacagccagtcgtccttgctggatgtgcaacgggttccttccttcgagagcttcgaagatgactgcagccagtctctctgcctcaataagccaaccatgtctttcaaggattacatccaagagaggagtgacccagtggagcaaggcaaaccagttatacctgcagctgtgctggccggcttcacaggtgtgtgtggaactccgagagcctggccgcccagtctcctgggtcctgtcccttgcttcctttcgagccacagtaccacattcaccgagggtgtttctaagctaggtacaccagtgctctacactccatgttttatgcgtggcttgctgtatctctgaattcgacaaaagccacacttggaggaattttcatgtacacagagctccatggaatgagtgaaaattgacaggccactccctccacctgggacgttctgaggaatagttggagcaggggacatggcctgtgcagtcttcagccctgactcacccactccaagaatctcaaagaatgtaaactggcttagggaggggcagcagagccagtctcaaataatatgggcactgtttaccttttcttgcttctaaaatctatctgctcttatttttgaggtttgggtgagagctattctaggcagtggacaaatataaagctgtttttagaaacaggtatttccagtactttagcgaaaatactggggctttgttttcactgcttcgtgtatccttaaatgcgtttttgtttttgtttttttaaccatatggagccactgtggattgaaattacctaacttaaaaaaatctgataagtttaaaataaggatactgaggcattcattctttttctgtcatctaagaacaatcagccacgtaaacgtattaaaatacacggaaagagtgtgtgaaagccattatcggtttcattattgggagtttagggcctgagaagaataaacagccataacgttagtgtggttcattttaatagtaacataagtttctgtttattgactgccaactctgtagttaagtaggcatacagtctgtaggacagcctggcatgggggtggtatgaggccattttacagatggggaaattggctcacaggcagacagctatcggtgctcacacagctctggttctagaatgcctgtcccgtgctttacagcaaagctttattgataacggccattgcgtttctgaggaagagctatttggtagaaagaggttgggcttagggtcggaagatctaggctcttctcctgtttgctgtgatgggcgtgtgatccaggacaaggcacctggcctctgagccgcatcttatccctcctctttagaacagaaccacactgacacctgctttgcaaggtggtagttctaaatgtcaatcgaggacaggtggacgagaagctcttggcaaagcatgcttcaccagacagaggctgtgaggcaacgggtgtgaccccgcgtggctattgagtaaaccgggctcacattaagcaatttacacatggtcatttggcaggaaggtggcatgggatcccacgtatgacacgcctcattctgtgatgaaacaccccctcagccacccccatctctgccccactgggtgtttctagaaaaaaaccttgaaggtttttacataaggaacaattaaaccagatggggaattttaatgccaagagttggtggccctaaactttcttccagaaagaacaaacctagcaatcaaggggaagagtgtctcgcctagtgaccttattttctaggagtaggcagtgtggagcaggaactcacatttggtgccccgccccatcccgttaaagcacttagtactgtcaccaacaccttgagtgccaccctgagtgtaacatcggaaccccattcagagagttgggtctgcattcctaaatcagcatgtacaattaggatggttaaagacttgctgtattttacatctgtgaaagggtatgatccgtctccctccctctccccgcaggaagtggacctattcagctgtggcagtttctcctggagctgctatcagacaaatcctgccagtcattcatcagctggactggagacggatgggagtttaagctcgccgaccccgatgaggtatggccagagccctgggaaatctctgggcttgaaaacctgatttcctgcttgcattcaaaaactcagttctttgggcacaaaaaagggttcaccagtactgctgagaatctttccacgtgaggcatccttggctgttgggaaaatggaagtggagtcattgctttgttgataaacgtgtacagtgttttctgggtatgcttcatacaagggcgttgcacagatttcactgtcttgatcagttgtctgatcaagaggcccaagctgcaaactgaggttctctgctgaccatctgaaaatgccttaggaaggctgcccttgtccatcgggggaacaagcctcatgtggccccgagccagccttctgtccactccttagctgagcccagcagtgttgaccccagccctgcagagttagaaccaggagccctgtctaaaggagaaggccaagggcaggtgggataccaaccccgccagaaaagcgttagagagaagcccttggtctctggcactggggagcgtaatctgtcaccattcccaccccgcctccagttcccttgggagacaagcattgaggaatgagtatatcacacagctcagaatcccactcggcacctgttaacttcagtagttggaatatccagcctggagggtgggtgacaccacctttccctggtctcaggaccctcctggctctgaacccttggctcccaggaggtttcactgagctggggccagggagcagggacctcattccccagtggttctgccccttggggacacagtgcccctaccataggtactcaaaggtactcagaggtactcaaaaggtcctcctgcggaccttgtgtaggtgtcaagttctctctagagtgaacatgcctcagaatcataatcagggaggaatgtcattcactttttcttcattgacaaattgagtttaactcttttccatccatgttcaccaaaggtggcccgccggtggggaaagaggaaaaataagcccaagatgaactacgagaagctgagccggggcttacgctactattacgacaagaacatcatccacaagacgtcggggaagcgctacgtgtaccgcttcgtgtgcgacctccagaacttgctggggttcacgcccgaggaactgcacgccatcctgggcgtccagcccgacacggaggactgaggtcgccgggaccaccctgagccggccccaggctcgtggactgagtgggaagcccatcctgaccagctgctccgaggacccaggaaaggcaggattgaaaatgtccaggaaagtggccaagaagcagtggccttattgcatcccaaaccacgcctcttgaccaggctgcctcccttgtggcagcaacggcacagctaattctactcacagtgcttttaagtgaaaatggtcgagaaagaggcaccaggaagccgtcctggcgcctggcagtccgtgggacgggatggttctggctgtttgagattctcaaaggagcgagcatgtcgtggacacacacagactatttttagattttcttttgccttttgcaaccaggaacagcaaatgcaaaaactctttgagagggtaggagggtgggaaggaaacaaccatgtcatttcagaagttagtttgtatatattattataatcttataattgttctcagaatcccttaacagttgtatttaacagaaattgtatattgtaatttaaaataattatataactgtatttgaaataagaattcagacatctgaggttttatttcatttttcaatagcacatatggaattttgcaaagatttaatctgccaagggccgactaagagaagttgtaaagtatgtattatttacatttaatagacttacagggataaggcctgtggggggtaatccctgctttttgtgtttttttgtttgtttgtttgtttgtttttggggggttttcttgccttggttgtctggcaaggactttgtacatttgggagtttttatgagaaacttaaatgttattatctgggcttatatctggcctctgctttctcctttaattgtaaagtaaaagctataaagcagtatttttcttgacaaatggcatatgttttccacttctttgcatgcgtttaagtcagtttatacacaaaatggattttattttttagtttaactgtgtttctccgacagctcacctctctctgaccacccagccatttccttcctgtgctccacgttcttctgtgtgattaaaataagaatattatttttggaaatatgcaactccttttcagagatcaggagggatttatgtagcagctatttttactgcaaaagtaattcactggaaaaaaaatgtaatttgtaagaaagctttatttttatctcagctctatgtaaagttaaagttactgtacagagctgaaggacggggggcggtaggggtcttgatgaaacctcttgaacgaagcacagtttgtcccatctttgttcactcgtgtgtctcaaccatcttaatagcatgctgctcctttttgctcagtgtccacagcaagatgacgtgattcttattttcttggacacagactattctgaggcacagagcggggacttaagatgggaaagagaaagcatcggagccattcattcggagaaaacgttttgatcaaaatggagacttttgtagtcgtttcaaaagagcacctgagtcatgtgtattcccggcctttataaatgacccggtcaagttggtttcaaagtccgacaggcttgtctgtttactagctgcgtggccttggacgggtggctgacatctgtaaagaatcctcctgtgatgaaactgaggaatcgggtggccgggcaagctgggaagagcaaagccagagctgcgctgcctcaatacccacaaaagaccattcccagtatacataagcacaggatgtttttctcaagagggatgtatttatcacttggacatctgtttataatataaacagacatgtgactgggaacatcttgctgccaaaagaatcctaggcagtggctcattgtatgtgaggttgaaccacgtgaaattgccaatattaggctggcttttatctacaaagaaggagtttcatggggttcagcctaacagttatggaaactacagtccttataaaccattggcatggtaataaacagatcttaagtataaaaattttgtaattgggcctttactctctcaataataaagtattttgtttatataaattctttgtgatagtcctcgttcttcctctccacacccagcatgaaggagttggaggaaggatgttaaccccagatccattctctactcaaaacattccatcatcaagcggcaagtctctgtttaactggtttatacacaagtcacttagaaaccacaacccaaattggaatcaactttgagcccttcctaaaagaattcccaaaaagtgctctctttcaaaacaaaaaattcttttaagaaagtgttataatagaaagattcaaatgtctttctttgccagaagcttggcagagataacagaggagagattctggaatgtttatattaagtacattagaatttgaggtttaagtacttttggaactgaggccacaacactctgtcccctcagtggagtctgacattggtaaggtgatggtggtcttaggacacctgttttcaaatttgttctctttacatgctccaaaattagtgagtatgccaaaaagcttatattcattggtgcgctagagccagctcactgtgttctcccgagagctacatgtcccttcccatcatcgcatcagtaatggtagcttgagatggggcgtgatgagagtatttacaccatgggaatcagcagacactacaaatcagggccttctctcccccagagtgctgattgttaaacatttaccaacactctactggttatatctatcaataatttccatattagaaattaaagtaaattttaaaagaattcatttaaaaataattttacttattggcattaacagcatttttttcttgcaaaaagtaattattttttaaaaagttagcatggcattgtttcacatttgcaaatctctttaatgtctggtttagtattagagctggattcttctgtttctgcattcaatctgtttgcatatattttgatagagtatgtgaagaaaatccggcctaacagatatgtaacagaaacaaggaggagcatttaagactatttcagataattgtagatattctttctttactatgccaaaacttaacaaagtataattccttagttgcaattcaggtatgaaaccatattaataaactttcctaaggttacattaaattccattggcctacgttgcactttgaacagatcttttagccgtgtgtgattttgtaacatcctgcattggtcacttggaaaatattgcttcaaaatgttaacacatttcaaaatataatattcaacaattacattacttaatatcaccacaaatcacatcagaaaattactgggaaactatcaaactcacagtggtggatacacactttttaaaattcaaattttcacttgaaacctcaaattttataatcagcaacaaatacccctaagtatttgaggagagattctcggatgtttatactaactacattagaatttgaggtttaagtacttttggaactgaggccacaacactctgtcccctcagtggactctgacgttgttaaggtgatggtggtcttaggacacctgttttcaaatttgttctttttacatgcttcaaaattagtgagtacgccaaaaagcttatattcattggtgtgctagagccagctcactgcgttctcccaagagctacgtgtctcttcccaccattttgggggggaagcgacaggctcactttatttagtttttgaggaaggaccagccaaatacccaaatcagaataatttgccagttattctctcagataaaagtgatattcatgaatagagtggacagtttagcttgcaactcaaatacacaattgcatctccttacaacaatcaccatatttcagtatgtgtgcagaccagttctttaagtgtactttccattttattacacagaaattaaaaagatgtgttttccattagtaaaaaataagtttttactgcttcatcaagagcattcttgaggccaggtgtggtggctcacacctgtaatcccaacacctggggaggctggggtgggcggatcacctgaggccaggagttcgagaccagcctagccaacgtgacaaaaccacatctctactaaaaatacaaaaatcagccagatgcggtgacacatgcctgtagtcccagctactttggaggctgaggttggagaatcacttggacctgggaggtggaggttgcagccagcccgggtgacagagcgagactctgtcttaaaaaaaaaaaaattcttgagtgaaactcttattttttcttttctttttttctgcaagtgcatggtggtggtggagagtgcagtgacacagtgactgccaactgttccggttcacgtgattctggttcagcaccatagtgcaaaaccacctgtgcttttataccatcatagcaaaggtcaaaaagtcaagcgtggatttgtatccttgtaaaaatagtcttaaccttgaggatccttctgaaagggtctcggagacctcagagtctgtggggcacattttgacaatcgttctagaaagaagagaggctcactcagagcaaaagtggtggatctctggaggacaaagcgaaggtagggaaaattagcctttggcctcccaaatccagtgtccgtgcttccagtcttctgaccttttcatagccaggtaaggaggaagcatttcttgtttaaatcaagaagaattgtctagtctgcatgataaagaaaagttccttcacacagggtgaaatggatactctcaaagcccttttcctgccatccttctatctttgttcttttccatgctccagtccaattccaaatctgtttcaggaaacaaaaaatgtatattttgccacttttttttgagacagggtcttgctttgttgccaaggctggagtttagtggcatgatcacagcccactgtaacctcaacctcctggactcaagtgatccacccatctcagcctcctgagtagctgggactacaggcatgcaccaccagacccatctgatttttaaatttcttgtagagatggggtctccctatgttgtctaggctggttttaaactcctaaaatcaagggatccttctgctttggcctcttaaagtgctgggattataggcatgagccactgcacctggtcttgccacagtttttctgaaacttagaagaaaagaggaaagggaagggaaataagtatttagagaaatcatttttcggaacatcttcaaaactgggattgtgcagagatgaagtcatggggcctgcctgcccgccttttccatggcggggaagaagcagaattacatttccgtcagttctgccccacatcctggctctcccccatgtcctggctctccccaacatcactcaaccagctttatttatttatttgtttatttatttatttatttattatactttaagttttagggtacatgtgcacattgtgcaggttagttacatacgtatacatgtgccatgctggtgtgctgcacccactaactcgtcatctagcattaggtatatctcccaatgctattcctcccccctccccccaccccacaacagtccccggagtgtgatgttccccttcctgtgtccatgtgttctcattggttcaattcccacctgtgagtgagaatatgcggtgtttggttttttgttcttgtgatagtttactgagaatgatgatttccaatttcatccatgtccctacaaaggacatgaactcatcattttttatggctgcatagtattccatggtgtatatgtgccacattttcttaatccagtctatcattgttggacatttgggttggttccaagtctttgctattgtgaataatgccgcaataaacatacatgtgcatgtgtctttatagcagcatgatttagagtcctttgggtatatacccagtaatgggatggctgggtcaaatggtatttctagttctagatccctgaggaatcgccacactgacttccacaatggttgaactagtttacagtcccaccaacagtgtaaaagtgttcctatttctccacatcctctccagcacctgttgtttcctgactttttaatgatggccattctaactggtgtgagatggtatctcattgtggttttgatttgcatttctctgatggccagtgatggtgagcattttttcatgtgttttttggctgcataaatgtcttcttttgagaagtgtctgttcatgtccttcgcccactttttgatggggttgtttgtttttttcttgtaaatttgtttgagttcattgtagattctggatattagccctttgtcagatgagtaggttgcgaaaattttctcccattctgtaggttgcctgttcactctgatggtagtttcttttgctgtgcagaagctctttagtttaattagatcccatttgtcaattttgtcttctgttgccattgcttttggtgttttagacatgaagtccttgcccatgcctatgtcctgaatggtaatgcctaggttttcttctagggtttttatggttttaggtctaacgtttaagtctaatccatcttgaattgatttttgtataaggtgtaaggaagggatccagtttcagctttctacatatggctagccagttttcccagcactatttattaaatagggaatcctttccccattgcttgtttttctcaggtttgtcaaagatcaggtagccgtaaaaaagagaattttagaccaatatccttgatgaacattgatgcaaaaatcctcagtaaaatactggcaaaccaaatccagcagcacatcaaaaaccttatccaccatgatcaagtgggcttcatccctgggatgcaaggctggttcaatatacgcaaatcaataaatgtaatccagcatataaacagagccaaagacaaaaaccacatgattatctcaatagatgcagaaaaggcctttgacaaaattcaacaacccttcatgctaaaaactctcaataaattaggtatcgatggaacatatttcaaaataataagagctatctatgacaaacccacagctaatatcatactgaatgggcaaaaactggaagcattccctttgaaaactggcacaagacagggatgccctctctcaccactcctattcaacatagtgttggaagttctggccagggcaattaggcaggagaaggaaataaagggtattcaattaggaaaagaggaagtcaaattgtccctgtttgcagatgacatgactgtatatccagaaaaccccattgtctcagcccaaaatctccttaagctgagaagcaacttcagcaaagtctcaggatacaaaatcaatgtgcaaaaatcacaagcattcctatacaccaacaacagacaaacagagagccaaatcatgagtgaactcccattcacaattgcttcaaagagaataaaatacctaggaatccaacttataagggatgtgaaggacctcttcaaggagaactacaaaccgctgctcaaggaaataaaagaggatacaaacaaatggaagaacattccatgctcatgggtaggaagaatcaatatcgtgaaaatggccatactgcccaaggtaatttacagattcaatgccatccccatcaagctaccaatgcctttcttcacagaattggaaaaaactactttaaagttcatatggaaccaaaaaagagcccgcatcaccaagtcaatcctaagccaaaagaacaaagctggaggcatcacactacctgacttcaaactacactacaaggctacagtaaccaaaacagcatgatactggtaccaaaacagagatatagatcaatggaacagaacagagccctcagaaataacaccctaccagctttctttcctgatagggctccagaactccacatggtggacacttgtcactgggaatgattcaggctttaatggggctgctgggcgggagcacagggcttgagggccagaggaagtggagcaggaactgtggcaagaggtagagggagcaagctgccccatcacctctcctgaaatatcaagcaagttaacaggaggatttgttgtgatttggagatggaccttggattatcactgtcactgggtctgtcaggcactatttgtgaccttgggtatgcaatttaatcactctctgcctcagtttcccctccataaagccaggtcatttgtggctgttggggggattgatctattgggggtataagattgtgtaaagtcagtaacctgggatgggggtgctatttgaacagagcacgccaaggaaggtgtgtttgagccaggggatctgcaaagaaaatatggatcccagacaatcatgtctccattttcatcagaagaaatccaggggcagagttcagtgatgaaacaagtacttaactgaaccaagactcaaaccctggtcttctgttttctggtgttgtcctctggccaaaataaccctgtcatgtttggttgaagtcattataaatgctgccccagatgctacctagggctccttcaagtttctagttcctccttccacaaaccagaggccacagcccttgatttgaattttaaattatcaggaacctcctacccaaagaacacacagccctcatttacagcagctgctggcagctagctgagttcgaacagatgcaagaatctcataatctgggccagatattaatctgtcttttctgtaacagcaaaacagaagggtgagtcttgaagcagtgcagggggaaaccccttattgtgcaactcttttgtaactcctgggcggagtctggacatgtgacttctgcttgaaatttaacattaggggaaagaccatttttggtcatagctgaggtgatgacatcttggcaactggaatggacatgacctctgttccatgtactatgagtaactgccccctccccatttctcaaagtcatgttcagatggcaaaactgcctgggattaccacatctgactcttgctagctgtttctgtgtctatggcttcatactgtccagacatagacctggggctcagcacacatgtatgtttgagtggcataaggtcagaagcacagatccagcaaagactgtggcccggaggaaggtgggttggttggaggaaagaaagtggaggtgggagcaaacgaagataagtaaacaaaaaaatgagctcttaagcaaaaaagattgcctgtctgctgtagcctgtaaagctctgatgagaaacacttttatgatttgctggtaaactccacccaatttggttctggaagaggttatttttcattgcagtgtaagcatgtaattagttaattgggaaatatggcgccattttcaaagctcactttcatctgtcatctcacttacacctccctgtgaccctgggagattggttttattatgcccattttacagatgtggaaactgaagctcggagaggtgaaccccctaaaaagaaattggagaggcttatcctgactcatccgtggtccctgattccttgtgcctgagatgcagactgtggcttgggaataggggagggctcagagggctggagctcagctgagtggccggatgttccctcacagggtaccctcctttggcttcctgttgaccctagtagttgtcaatagtgctgcaggtgctccacgccttcccaccctctggatgaagctcatcctaaggaattagcatctcatttctaattctcaggtcctcaggaatcagacttgtattttgggtcaaatttgcataccttggggcttctgttttctcaagctatgtatggaccccagagcaaatcccaaccatggttcaatatcagcctctgggaatctgcagatcactggaagccaggctgcccacgctttctggaagccacttcctagtgaaggagccctggaggaaagaggcaatggtataggagtctccctaaagtgagaagtgtggagcccagcacttcaactatgtctgtgggtggagccaaaataaccagttgctcctgatcgctgcatgtcagcaattgtatcacaacaagaggccacagggcatcaccctacccaacactgtgatgggggccggggtcacatgtgcttaagtgtctctgtaaatcagcccttcagttgggattaagacagttcaggatcccaagaacacacatgcacacacacaacccacttgcacatacatgtgtgcagtcacacttccagagacacacatagacatacatatgtatacacacatgtgcgtgtgtgcacacaggtattcacatgcacacacacacgcacacttatacactaacacacatgtgcatatgtgcacgcatgcacacacacacacacaccccactccttttgcttgcttcaccttttctgtctctgctcctcctggtggtcatcacctcccatgccctgtctcctgtatcaatgccccaggactacctactataacaaagtgtcacaaagtgggtggtttaaagcaacagaaatgtatcctttcacagttctggaggctagaaatccaagatcatggtgtctataaggttggttccttttaagtgcagtgaggaaagagctggctccagccctctctcccattggctggtagatgatcatcttctccctgtgtctcttcatgtcactttccctccttgcccctctctgtgtccaaattccccctttttataaggataccagtcatattgtattagggccagatctaattatttcattttaactcaattacctctgtaagtaacctacctccaaagacagtgtcattttgaggttctgggggttaggacttcaacatatcaatttgagggcacacaatacagcccatatacacctcaacactaaataagttacatggtagttctatttttacttctttgagaaatcttcatcctgtttttcgtagtggctgcactgatttttacttccatcaaccgtgtgtccccgtcttttgatatgtgtgtatgtcatatgtcttcttttgataagtgtgtattcatgttttgaccactttttaatgggattattattatttgttgttgttttgactgttgactttgttgaggtttttgtatattctggatattagttccttgtccaaatgaatagtttgcagatattttctcccatccaaaagggcatctcttccctttgtagattgtttcctttgctgtgcagaagcattttagtttaatatagtctcatttctctatttctgtttttgttgcctgtgtttttgaggtcttagccataaattgttcgcctagcgcaatgtcctgaagtgtttttgctatgttttcttctaccagtttatgttttcaggtcttatgctcaagtttttaattcaccttgggttgatttgtgtacatggtaagagataaaggttcagtttcatgcatctatgtgtgagtatctaattttcccagcatcatttattgaagagggtgtctttttcccattgcatgctcttcattcttttatggaaaatcaattgactgcaagtatgtggatttatttttggtttgtctattccattggactatgtgtctatttttatgccaataccatgctatttgggttaccaatagccttgtagtatattttaaagtcagatagtgtaatgcctttttcttttttctcagaattgctttggcctttcagactcttttatactgttttttctatttctgtgggaaaaaatgatgttggtattttgatagggatttcattgaatctgtagattgctttgggcagtatggtcattttgattatattaattctttcaatccatgagcatgggatgtctttccatttgtttgtgttctctttcatttttttttttcattagtatattattatttgtgcagtgagcagagcaaagtcagggacactgtttgtagaacctggctgcctcccctcccgcagcccagctgattgtcctggttgccaggcgcttgtttgcattagagacagaacactctgcagggttctgaatggttcattgtggcccttaggccactggcaagcagtggcagagccacggaggggctgctggtccccaaatgtctctccagccactctggggctggtgggggctgccctgctggtgatggcttgagagaagacctgggggtccctgggcatcctggggaggtcctggtttgtgctgctgtggtgatcttaatcatcaagagatgacacactttatgacacacgaaaagaactgagccaaacactgtttccatcaagaggtccatgtagaaggcagccagaacgtgtagaaggatggaagtcaaggcacaggcccaggaagccttcaagtcacccctgatggaggccagaccttgaacattataatccctctgcttgtcaaccattaatacaggtcttccctgcaggacataggaggctttctgggaaaagcatggaaaaaacaagcctactaaatgttctcaagtgactgatgtaggacacatcttaaaaggatcaaaggaggatgaagaaaaacttcagaagaaaataacaggtggtttgaatgaaaacactcattttgcagaaagtccagaagtgctcaaccaagaaattacaagatggaagcaaagagtacagaaaaaggaggcgaaagaaaagctggaacttttgaatgcacaaataaaaaaggtcatgaaagataccatgagccaattaaaatctatggctgaaaacctgctggacaccatgtagttgcgagatttccctagagaccacggtgacgagacctagaaaacagagctaaagagaaaagcagaaaatgaagaccgcctcccccagccccagccctcccaactgtaagtcagaagagttttgctgggtgatggtgacttaaatatgtcctgtgaaagtcaagaaaaatcaagaaatagccaggcaattgtgggaagaaaatgcaatgaatgagagctcacaggaaaaatcaaatgcctccaaactgagaaagcatctttgcaatttgaaaattcctagctgggccaggtgtggtggctcacacctgtaatcccagcactttgggaggcggaggcaggctgattacttaaggtcgggagttcgagaccagcctgggcaacatggtgaaaccctgtctctactaaaaatacaaaaaattagctgggtatggtggtgtgcacctgtaatcccagctacttaggaggctgaggcaggagaactgcttgaacctgggaagtcgaagctgcagtgagccgagattgtgcctggcaacagagcaagactccatctaaaaaaaaaaaaaatcctggctcacaggtgggatccagaacctgcagctgaagcttcaaatcctgcctgaatcacatcaagaacatatagtgcaacttcagagaagatcacctgaggtggaaacacacagcttagagatgaagaaacttcccagcatgtgtagaaacgtgaacacacacagcggatttgaagcctctacaaggagatggccaaagacatcagcaaagaattggagaggaccacttccttctgtcagaagaagattatcggccgggcgcggtggctcatgtctgtaatcccagcacgctgggaggccgaggtgggcggaccacgaggtcaggagatggagaccatcctggctaacacagtgaaaccccatctctactgaaaaatacaaaaactgagccgggcgcggtggcgggcgcctgtagtcccagatactcgggaggctgaggcaggagaatggcgtgaacctgggaggcggagcttgcagtgagccgagatcgcgccactgcactcactccagcctgggcgacagcgagactctgtctaaaaaaaaaaaaaaaaaaaaaaaagaagaagaagattatcatctgtgaggaaagagctcaggaaagctggagggcagttctgtccactgagagaaagctccaggagctaagaaaagaagatgattgtagtaggccaatcctggctgacgtggacttcaagttccaggctttccctgggggatcctttgctcctgcttctccaggcacagcccacagaggcccagaagtagcaggggtcccctgggtcatcaggtccccagcaaggaggagggaggtgctgtgaggctcagggacccaggccaccaggtttcactcaactctcccagaagtagggccctgaatgcgcgggaccacagagggacacagcagcctgggctgtctctttaaagtgatctggatttatctctttttagtttagctattgttacttgggatgccacgattttgatttcttgaagtttggtatagcattataattttacgttagtattttaaaatatagacatcaatgtaattctcataaatataattcctcatcactggaccctttaaattacatggtatgagtattgcatttttatttaagttcaccttttatgtttgagatgggtggagatgtttaaaacgataaagttcatttctgaatgccacaagctgttactgtacatctatacaagtaacagtatttacctgaataaattttaattgtttttaaaaacaatgcaaaaaaacttaagaacaatataacattcaaactatctaatatttgtattagtttagtcctaaatttattgactaacctgggagagttgatattttataactatttgtttcttgttttatatttttcttaaccattgatgttttaagacaatgttgtctaaacatttctaaactatataatcaacaaaaagatttccattgatggcaaacccattctctgttacacacatacacacacacacacacacacacacacacacacacacacaaaacacccgaatgttgagagaagggactttcagttgttatgtcagtacctgaagaaaatgtagaattaagagagatacaaagtgtttttttaatatttacataaataaaggaaaaactttgtatgtacacaatttgtacacacagaaaagacaactaaattatctatacactaaaggagagttgcctgatgaatcagacaagatttcaacaagaaacagttcattccaaatggtgcagatgaagagactttgataaaggaaagtttcctgggctgtcacagtttcgtatgacagtttcctgggcggagataaaggcttggacaagagatggtgagactcccaggggctagcactagagaaaaggtagtcttacctctggacctaaaaggaggaggatgtggtgtcatctgagcccagtgaagaactgtcttgggacctgaagaaactagagctagaggtgcctactaaggtggccacggcgcattgctggagctgtgccccatgctccaactgtctctgcagccggctggggagggtgggaacatcaaggaaggctctctggaggaggtggtccctgagcttaacactgatgaatgagtaggagctacctccaatgcttttcacacatgaaggggtagatgaatcacttggagatctttcactaagcaggttcagattatcaggtcttgcagcaggagctgagaccccgggttgctcccaggtgatgcctacagcaggatgagatgtggaacagcaagaatccttcgataaatacagggcaggatccggggaagttgaagggacaggagcatttcctgcagacagtacagcccaggcaaagacacaagggcacagacagcctggtctgcgtgagctgcaccatgtgactggggttctgcagcccaacatcaggcaggaaggacaggaccatgagaaacagcgtgcaacatatgcagggtgtcttcccaattatcctcagaaacactcatctgcgtgggtgagtcttgtcctgaggataccacctgtcccagaaaagtgtgaggaaccgtaggctgaagctcccccttggagaagccaccatggagggtatgcttggcctccagaatcccctgtgtgggtcagcagctccctgctctcccggttgctcagcccagacatctggaaatccctcctgactcctctgtatccatccatcaggtactcccataaattccgccctgcaaagcccctctactcttttctgtccatctcgactaccaccatcctgtaagccaccattacctcttcccaagtgctctgttccttgggtaaccacctcccttactaggcccccacttcactattacttcctccaattcatgtctgcacacagccagagtggaccttttaccaaagacctgagcatgcttcatatgaagccagacctcggcctgcatgcggtgagtgtgcagcagcccttgaccttggtccttgtctcctacctcgggtcatgaacagcaaaggtgagcacacatccctgagtgccctggacgggcctggctggggccagcgtatcatgctgtgcccagtatattattcatagctccctttcactcttaaaattgcttcagttacgacaataaattatatgatcacagaatgaatgggtcacttgcattcaaacttttcaaagagaactgcaacattcctaaaatatagaagctcatgagaaaatagacaacatgagtcaaatcaaactctaaatacagccgtggacagtcaaagaaacgccactgctttgccaagttagcccatgtgggaacatcacgtttttggttaagacaattctatattcttaaaggccaaatgtaagccacctcagttttgggaaggtcccaataaaagctgaataatgtgtaagcatagtttaaagttaaggcccctctaatttattgtggacctgaagatattatgcttgaaaatcatttcacaggagtccattctaaagtttgtatgatgcaacgttcttgtgaattatagacaaatgattcatctgtttgactcagattcaaggacattttttgtggtgaagtaaggcactgagtctcaagatataatgtaaagatatggagttgctatgccaggaaaagaactatagaaagggcagctaggaagtcaatgcaatagtcagcacacctctggggccctccctgggagcctctgattccattactcttgggtgggccctggacatctatattttctccaagttccattcatgattctaatgctcagcaaagctggggaaccactgcaataaggcatgatcttgagagttatggcgcagagacatgcatctgcctctgactcagcacaaggggcaccccgcttctcacgtctcatgactgcatggtgtacagtgtggtcagttcagcctttatgtctaacctctgtccttctccaccctgtggggtgccgctgacctgtggggtgttgaccacaaacagattcctaccccatgtttcttgggggttcatcccatggggatttccagaaggagactggagtttcactctcctgcctcccctgatccctgctttttttttttttttttgagacagggtctcactctaacactcaggctggagtgccgtggtatgatctcggctgactagcaacctccacctcctgggttcaagcgattcttctgcttcagcttcccgagctgctgaactaaaggcacgtgccaccacgcctggctaatttttttatttttagtatattttagtagagacggaatttcaccgtgttggccagcctggtcttgaactcctgacctcaagtgatctgcccgccttggcctcctaaagtgctaagattccagacgtgagccaccgggctctcctgcctcccttttgaccagctggccttgagctggctgtgtccgtgggcctgaggctatgctcctctcaaaggctgactctccatggctctccttgtggttccactaactagtgcctacccttgtccctcgaggcttagaaggtgctgaagctgaactgcagggagccccaggttactgcctgtattcattacctgtgtctgctgtaagaaatttccacacactcattcacttaaaacaacatatatttattatcttacatttctagaggacaagagtccagaaatagtcccactgggctaacgtcaagggctagtgccctctggagctcctagagtcagcctgcattcccaggcttatggccccttccaccatcctgagagccagcagtgtggcaccttcaactctctctctgcccaccctccgctttcatcatcactcatctctgactgtgaggatcctgcttccctctttcgaggaaccctgtgactacatgggtgatccatgacagtctgcccatctccagatcctcagtcaccctgcaaagtctcttttgccgagtaaggcagcatgttcacaggttctggggagcaggaggtggacctcttgggggtcattattgcgtgtaccgcaccttgctttctactttgcagtttcctacgcccacacctttgtgaacagccccgtggtgtatgaaccctcctcaaagtcacctgtttccagcatcattttttccctaactctgtgcaccatctctagcacttattttttaaatgtattgaaaagatagactcaattagcacttatggaacagctttccgaggaaatgaatagatttgagcagtttgctgatagaggtgcccagtggaaatatcaaagtacaaatgagaatgttggtggtttccatgaagtgaagctgtctgaccagacaataacatgagaatcatgtctccacagagattacccacttttgaatcactctgtcaaggtgttggcacaatgctgccctcattatcgaaaggcgatgactacaacagtcttgttcattcaagagctgtactccagtcaaggaactgagaacctcccagggggcacagccttgtgcttggttgtgcaaccaacatgccttatttctaatttcacacacaatgtgtgtgatcagcaaaacaagggccccccaaatatgtctatgccctaatctctgaggcctgtgaatatgctgtgttacatggtcagagagactttgcagatgtaattaaatttagggactttataatagtgagattgtcctggattctctgggtgggccaaattaatttcatgaggccttcacagtagggcactctcaggctgggagcagaagaggggtgcagcaggaagagaagtcagtggagtctgatcctgagatggatggcatgcacgctcactggccctgagatgcaggggccacatgtgaggaccagagggagatctctaggggctctgacggctcctcccagctgacagccagcaaggaaacagggacctcagccccacaaccatggaaactactagcagtatagatgaacctggctgctgatttttcccaggcctcttagtaagaacccagctggttgacatcttggtttcaggcttacagaacccaaagcagagaaagcagttgagctgtcccagacttccgacctacagaactgtcaggcaataaaccgttattggtttcagcccctagctttgtgactgtttgtcatggcagcaacagaaaactaaacgaagccatttcagtgagagcaggaaaagtgctgtaaaatagtattctctaaaagagaaaattttcattgtttatttctgatgataaaaataatacactctcattcttggaaaatagaacaacatgaaaaaaaaagaagaaaattaaaattacttataatctcgccaaccagagatcattatcattattgcaatggactatatcatgttccctcaaaattcatatgttgaaattcccaaccaccaatgggactgtattaggaggtggggtctttatggaggtaattaaggtaactgaggccatgaaagtagggctctgatcgaataggattggtgtcctcataaaaagataatttaataattatatatattgtatatacacaatctctccctctctctctctttctctgctacgtgaggacacagcaaggggagagagcagctatctgcaagccgggaagaaagcccgcatcagaaacccaataggctggcaccttgatcttggacttccagcctccagaactgagagaaataaatgtccgttgtttaggccactcagtctatagtatttacttatggcagcccaagcatactaatacaattactgatcgcattttcctgtatttcttaccaatattttaaagcccacatttttcttagaagtaagaacatgtcatatataatcatatagcttcttaataagtaacattgttgccattaatatgttactagaaaaatttaaaaatctgtttttcaatgactacataatagtttttcaagctccataatggcaaggtctttccttttttaaaaaagtgaggtttaatttacatgcagtaaaatgaacagattgtaagggttcagtttgatcagtgtattagttcattgctgcactgctgtaaagaaatacctgagactgggtaatttgtaaagaaaagaggtttaattggctcatggttctgcaggctgtatagaaagcacgacagtctctggggaggcctcaggaaacttacaatcatgtcggaaggcaaagaggcagcagatgcatcttatgtggctggagcacaaggaatagagagagaggagagaggtgttgaacacttttaaacaaccagatcttgtgagaactccatcacaagaagagcatcaaaggaagaaactgctcccatgatccaatcacctcccaccaggcccccgctccaacattggggattacaattcgacatgagacttgggcaggggcacagatccaaaccatatcaatcagttctgacaaatgcattcagctatgtaactcacatcactatcaatatattagatgttttcgatcactctagaaaattccttctgtgccacttcctgatcaattcccaccattccagaaacaacttctattctcatttctatccccatgaattagttttccttgagaaggtcataaatgttatcatacactatgtacttttgtgtctgcttctctcactcggaataatgcttttgagattcatgcatgttgctgtgtattggtgctttggtcctgtctgttgctgagtcatgtatgggtacactgcaattttgttattggttcaccagttcatgaacgcttggcatatttctgttttggagctagtatgaataaagctgctatgaacatttttgtgcaaggatttttgtgggcatatgttttcatatctctaggaactgaattgtgagtcataggatagatatatatttaaaattataagaaacttccaaaccatttttcaaaatggttatatcattttatgtgctcaccagctacatgtaagagttccagtagttcggcttcctctgctatacttggaatggtcaatctttttcattttagccatgctagagggctgaagtcctatctcacttttaatatgcatttccctgatgactaacggtgttcatgtgcttattggtcacatatcctatttggtaaagtctctttttagtcttttacctaattttaactagggttgttttttttattattaaattctagcagtttttaaaaatatatgcagatgctccctgatttgcaatggagatacatcctgataaacctgttgtaagtcaaaactatcatgagtttgcatttaacactccaataaagccatcataaagtcaaaaaatcataagaatggacgttttctcccagcctgcggcttgcctatttcatatcttaataatgtcttttgatgggcagaagtttttaattttggtgaattctcataatgcttggctgtgggttctcatccaaatctcatcttgaattataatttgaattgtaatccccacatgttgagggaaggacctagtgggacacgattggatcatgggggcagtttcccccatgctgttcccgtgatagtgagttctcacaagatctggttgtttaataagggtctggtgctacccccttctttctctttctctcctgccaccatgtaagatgtgccttgcttccccttcgcctttgtgaggcctctacagccatgcagaactgtgagtcagttaaaccccttttctttacccagtcccaggtagtatctttatagcagtgtgaaaatggactaatacaaattccaattccaattttagtgaattccaattccaaattttggtgaattccaaaaatttttttctatgactctgctaacaaatgtgtccatccccaaattcataaagatatttttaaagttttcttctagaggttttacaggtttagtgttatgataaggcctatggtccaccttggaataaattttttgtatggtatgaggtagggattgaggttcttccctctcctcatatggatttcacttatttctgcatctgtttttggaaatttcctttttttctcgttgaattgctttggcatctttgttgaaaataccatttgaccatatagttgggaacttatttctagaatttctattttgcttgatctttttttgtctgttctttcagcagtacagtcctgtattagtctgttctcattctgctaataaagacatatgcaagactgggtaatttataaaggaaagaagtttaattgactcacagttccacatggctggggaggcctcacaatcattgtggaaggcaagagagcgtatgtaggagaactcaaaaccatcagatctcatgagacttattcactaccatgagaacagtatggggaaaccacccccatggttcaattatttccacctagctctgcctttgacacacgcagattattacaattcaaggtgcaatttgggtggggacacagccaaactatatcaagtactgttttgattactacagctttaggttaaaatttgaagtcaggtagtataagtcctccaaatttgttctttttcaaaattatttttgccattctatgtgctttgaattttcatataaattttagaatctgctcattgatttctatttttaaaaaccatctgggatttggattgggattgccttgcatctatacataaatttggagataaatgacataataagaaaattgtctcccaatccataaacattgtatatatttccatttatttaggtcttattttatttctccacaacatcttatagtttttattacagaggtattacataccttttgttaaatttatctctaagtatttcatattttggggtgctattgtaaagagtattttaaaacttttatttttaaatgctatataaaaatatatgtgtatataaaaacacatacatgtgggtgtatttgtatatctatcactacagctatatgtttatattaatgtctatatctatgtctatctttgagtctctattttcagacttgggcaaactctactcctcaatttgtggaaaaatctcagtattgatctatgcatggtaggtgcatttcatacatatgtatgtatttttaacaatgtaagaagcaccctctatttcaccttccaaacaaaaacttaactgacagtaatctatatctaatcacatggtttccgccacttaaggcctatcccctggtctccatagtcaagtattatcatcccaaataaatctctgaatttattgaaccttttccctgttcacggattttgtggtgatgtttccaggtttttgctgtcacaactaattctgtaataagtatttttgtgtggtatatttggtccaaacactgattatattcttgggaggtgtttttataattggaattcccatgctaaagtacatcaaagggcatgaacattttaagattcttgatatagtttagcaaaagatttccagagtgcttgtatcaactaactctttcaccagcaagacaagaatggccacttcagagtacctttgccaaaatttattaaatttttttaacttcgttaaatataatgagtgacacttttaacttttgcattattcacattttattagacagtggtttttcctactctgcaaattttctattttgattttgaaatatttgtatttaatgatatttaatgtattgtggagagtaactagctgcacatcacatttatagaaagtatttttcccttttaattttgtacatgattataccaagttttatacatgctccatcctcatgacctaaacacctcccaaaaggcccaacaccccaacaaacagtgttacagtggggattaagcttccaatacatgaattctgggggacacattcagacaagagcaaatattaaaactataaattgtataaaattgtataaacacaatttacctattatctgttaggaagtgtcattgttctaaggtcatcctagtcctggtcagccagtctcacatgaaataaaatccacctggctgtgaagccacctccttcagcacagtgccatcatccctgccctctacttagtgaaaaacaatgggactgttaaagcgttgcattggaaagcattacctactcttccagcctgatctggaatagcctcagacgcccccagcccctctcagaatgaggggactttttccagctccgcaggactgtgcagggccccttcccagtgcagccttgactgtggggtgcggtccctctgcatgccactcacaggacaagtttaatcaagcccagtttaaggatcacaaccataatgtctacaaaaccatgatgaactacaaccatttgtagttcattagttcagaaaatcattactgaacttctgtgaacctccacagtgcaagagccctttttgaaatgcaaatttggatagattcccagttcaggcttacttatatgccaagataaatgaaaaggggattcttacatgtcagtcaaagatgatttctcatctagcacacaccctgagcttctggaagtcgcccagtcactcactacgttatttgccacacaggtattacacaaagaccacgagaaaaagtcatcgtccaaaccagagaaaggaaattgaccggtgacctgtcctgggcgcatagccgcatgtgatgacaggcaggaccctggcagggcagagaaaccagctctgttcagaggtttccagactgtaaatttaaagccctgtacaatttcaacaacaatgaaaatttaaggatcaagtgtactggcctttcaaccttccactttgccaaataagcaaattgaaaaaatagttacactcatttttgctatcattttataaaaggatatttttaacagaaaaaaagggtaaagaaagttatcttagaataaaagacagtttctcaattaagttcatttgaagtatgacaacttgctatacattccttatttttctactttcgtttgcagaccagtgcaaaggcttttatatggaccaaccccagtcagaaagcaggcacttggaaacctcgtgtctgtgaagaacaaggggtggaacctctgaaatcctcccctttgagatttcccatgcattcacacatccttctgtgtgccttgaaaatgtaagaaacagatgtgggcaagaggcagccagaagactccggcacaggccctgcaacctatctgctcacatcctgcttgggagacatgtcagcgataaactccaggagtagtcacgagggctgacaggggttcctgcccggctctgcatccaacagcctggtggagcctaggctaagtctacaaaaatacggagctcagagctcctacctagatttctttgctttattcaggcagaattgacaaattaaaaggtatgtatttaaggtgtactacttgattatttgaaatacatgtacacaattatgctaattaacatatccatcgcctcacagttacctttttggtatgtgatgagaacactcaagatctgacctcttggcaaatttcgtgtacaacacagtattgttcattgcagtcaccacgcaggacactagatctccagaatttaagttacgttttgattgattaggtatgagttgggcctaacgatagcattttactctttttattcttttttctttttttttttgagacagggtcttaactgtcacccaggctgagtgcagtggcacaatcatggttcactgcagtctcaactacctgggctcaagcaatctcctacctcagccccacaagtcggtgggactataggcacaccatcacgcttggctcatcttctatttctcatagagacagggtctaactatgttgccgaggctggccaggaactcctgtacacaagtggttctcccgccttgggctcccaaagtggtgggattacaggcttgagccactgcacctgactggacattttactctttatcacagcattagatacacatggtctaaaatatcacaaggcttataatggaaacaactagcccctggctctgcctaccccacgctgctcatagccatgagattacgaccaccagtgcacttagtgatgcttttgggaattcacttctatgctcgttaataacatgctcatagggctagatcctgatcctccattgagcacattaaccttggggatctgcaaaaccatggcttctccccactaaagatgtccatgtcctaatcctgggaacatgggatcctgtgaacatgtcactttccatgccagaagggactttgcaggtgtgattcaagtaagcatcttgagatggggagattttcctggattatccagcctggtccaatatcatcataagggtccacatgaaagggagggattatccagcctggtccaatataatcataaggatccatatgaaagggagggattattcagcctggtccaatatcatcataagcgtccatatgaaagggagggatgagagtggagtcagaaaaaagagaggtcgccgtggaagcagaggttggaacaattcactgtgaagacagaggaaggggccaaagccgaggaatgtggcggcctctggaagctggaaagggcaaggaagattctcctcagagcttccagaaagacaacagccctgccgacgcctttgattatagcacagtgaagactcatttcagacttctgaactccagaactgcaaggtcacagttgtgttgtcttaagccactgaatgtccggtaatgagttacagaagcaacaggaagccaatacagctctttaatactcccccaaattaccaccctgttgccccaacaaacattcgcttctctttcttcatcttcccaatgttgtttatctgggtcttcaggaagtcaatactatgattatgtaaatattttccactgagccacatcaagaaataagattgcatttctgtctcgtacatgtgtatgttttcaagcttataattactttggattttccccgatgcacctctggctaattttcaacagccacaatttacttgtaaaacgctttctcaattctattttccgcacagcttatatatcaaaaaaaaaattcagttcatgtttttcctggaggaatgcctccgggaaaccctggtctcccagcttccacctggactgatggctccctgggtcccctgcatggctgccagcctgacaatcccttctgtcctgctctgcttcactggtttcgctgctgagactcctctttcttggttttctcttatcttggacgagcatgtgcccagtaactgcctgagaaagggtgcagacaagaaacgtttcttgagatcttgagtgcttgaaaatgcctgtatttcattttcaaaattgatcagtagtttcataagccaagaattccacattagaaatttgttgcccttccagaattttgaaggcccttgtcttctagctccctgtgttgctgttgagaattctaagggcctcctgattgctgatatttgctaagtggcctctgtgttcctctagaagcttctaaggccttctctttatctctgctgcagtgatattccatgatgatttgccttggcctgagcatctatcaggagatttatgccacttagctctagggaattttcttgcattttaaaaaataacttattctctatatatttttttccttttctctcttttggaattcctgtttgtcaggagttcaactttcttctcttgtcttttcatctctcctctcctattgttggttcttcggccttttgcggtattttttttttggcaaaaattctcattgttatcttctaatcctcctgtagaattttgtttcagctctgtcctctttcctgcccctaatcctggagctatgaatgttcctgctaggagcctgatcttgaatcacaagtatacagctcctcttaagtcctagaaggttttaattgtgggtttgtccagaaagtttccctctgctccctgaattgcctgttttctctgagatcctttctgtcttgtctttagtttctgtttgtctgtgttagagggcttcctgtctggtgatccttggctatctattcatagttaagagtgagacactaaaatatttatcagaaactggtgtgctggggcaggatttgcctgtgcagtgagaggcgaagtacatgttcagaggagcccacattgttagcatctggagcctgtcctctgggtgatgttgtcctcagaggtcatctgttttcctgcttgctggttataggtttggctatggctgccctggagcagggatggggaaggggccagaagtccaccattcagtgtgcacaattcatatccccacctcaccctgcactggagtgccagctgcctcgatttcccagaggatcaccctcgagtctctcgtgggatcaaggagctagtgtctgcctgagcagcagatctaacaacccttggacagcattcaataacccacctcttgccaaccccatctcatcccaacctttcagagggcctggagtctgattccggagcctctcgggtggatcctcaaggtcttctgcctgcacctctgactgcagacactcggtagccagcttccttccctctgctaagtcacctcccacccatggctgtgtctgctttcctcttcagacataactcacattgtcattcatcttatttaatccccagtcctgggctcctcatcctgtaaggttccctgttttcatgcttttactgacattttagggggggtgggcagaaaagtaatgaaagtacatgtaccaccggccatgtttaagcctcttctgcctgggctgggcatggttgttcacgcctgtaatcccagcactttgggagtccgaggtgagtggaccacctgaggtcaggagttcaagaccagcctggccaacatggtgaaaccccgtctctactaaaaaatacaaaaattagctgggagtggtgttgggcgcctttaatcccagctacttgggagcctgaggcatgaaaatcacttgaacccgggaggcagaggttgcagtgagccgagatcaggccactgtgctccagcctgggtgacaagagtgaaattccatcaccaaacaaacaaacaaacaaacaaacaaaaaagccccccaaaaaacaaagactcttctgcccatgcctgtcagatactgaaggaaaaacgcaaagcaccttccaggaaagctgagtcacagaggtgcacagagccaacccaggagcttctctttctcccacagcatgcacccatccctagcaagtcctgccagctctgctctaaacaggaccaggctcaaagctcatctcttcacctccttcactaccttccctaccattcgtctgggattcctgcaggcacctctgactagactgccctgctgtgtcctcttcagtctactctcagaaattagactcagctggagagattcctgttaaaacaaaagtcagataatatgaccccttcattctaaaccttccgacagcttcccatttcactcatgacaatatcctaaggccttaccatgaactgcagagtcaacacaatctttccatatcacctcctactcctggcctctttgcttaatctgcatcaggcacactgaaccccttgccatttctcacacacactgagtgtgttccagccccagggcctttgcacttgctgctcgatccccagatactcctatgatcatgtcttcacttacttccatgctcagctgaaatgttaccttatcagagagacctccattgttttatcaatccatttgcggcctgaaaaagtctgattgtgattcctgggttccaaacaccttgatccttcagctgctgatattacaatcagaaattaatactggttattggtattctgacttctatttggaatccacgaagatccctaggccaacacttctcaagctttaacgtgcatgtgaaccagaaagatgctagccagtgcttcttagacttttacatacaaaggaatcactttgagagcttgccaaatgcagattaagactcagcaagtttgggactagaccagaggtttgcatctgtaacacgcgcccaggtgatgttgagcctgctgctccccagcttaccttttgaacgacaaagtctagaccaaggtgaggatactgtccctctcatcccagacacacaagagaggctgggccttcatccctcccatccccacctgtgggcaagttactccatcagccagaagatggtcagctcttacagcctcagaggtctaatgacgcaacagctgcagcacctgctccctgggtgcccgcctgtggggtgagtcagcggctggactgagatgacagctcatgagcatgtctcctgggactgtgcctgtggcctgggcttgggccagactccgtcagcaactaaatgcacctggaaggctctcctcagctctgcaaatcccaccagctgcctgacctgctttccccaagccctaccactcctctcgcctactcttaactgccttcgtcaccccagttaggtcaaatggcattctcttcagaatgacctctaccatctgttgagactctgttatctgccaggcagtgttgcaggcatttcccttgcatcatttgatttaactctcataagtgtgctatgggatgactgttattaccttcttttaagatgaggaaatgacactgcagtgacaataactaatttgctcaggatcacaaagctgggaagtgatggaggtgggatcccaggctggctctctgattccatcttgggcaggggacatcacatctgtgccaccaccctacttgtggtctaccaggctccaccacctccattatcttagtggacaggtggagaagcaccacctcatctttgtggagggaaatgctgtacttcagcttccttcatcctaacacccagggaaaaggaaacatcccagtcccatctcagctagctttcctgtattacctaatataagatgggataataactgagactcccaggtgaaggtcacagcccagggacacaggctcactaaaaacctgaaacctaatcattggactctatatagaatgattcgcctcccccatttctgcccagcacatccgcagtgctcttttgtagtaactggaacacaatataagctatatgtcagtgagcttgaagatatatgaatagaaacttctcaaactgaaagacaaagggaagaaagactgaaaaaaaaatggagcaccatgtttaaaaatggcaggacaattacaaaaggtgtaacatatatgtaatgggaataccaaaaaagaagaaagggagaaaagaacagaaaaaatatttgaagtaataatgactgagaattttccaaaattaatgagacaccaaaccacagattcaggaaactaaagagaacaccaagcaggatggatattttaaaacgtatacctaggtatatagtatatattcaaattgcagaaaatcaaagatgcagagaaaataatgaaagaattcagaggtggaaaaaaaacctaccttacgtatggaggatcaagcataagactacatcagacttctcctcgaaaaccatgcaagtaaaaagagagtgtggagtgaaatatttaaagggctgaaagaaagaaaacaccactagctatagatagaattctgtatccagtgaaattatccttcaaaagtgaatggcaaatacttttgcagagaaagaaaaacggaaggggtttgctgccagtaggacttccttgaaaaagaagggaaaatgacataggtgaaaaactcaggtctactaaaaggaatgaagagcattcaagaagaaagaaacgaaggctaaaatgaataatttctttttcatattttatgctaatctaacagtttatcattttcttcaagataataatagtaaacatgtattgggtgattatagtttataaattagtgaaatgaatgacaaaaatgttataagagatgaggaaaagaattgtgaatactctgtgataacatattctcactacacatgaagtggtattgtgttatttgaaaatggacttggatcagttttaagtgtatattgcaaaatcacaggcaactactaaaaaaattgtaaagaagtataactgatatataatgaaagaggaaataaaatggaatcatataaaattctcaaggaaaatcagaaaaggagaaaaaagtgtaagaggaaaaagaaacagaacaagggaaacacatagaaacagtaataaatatggttgatattatatcaaatatattaataattagtttatatgtcaatgttctaaatatgtgaattacaagacagacgctagctgggtggattaaaaaaaccagacctaactgtatgttgtctacaagaaactcactttaactataaagacacaattagaatacaagtaaagagatagagatagatataccatgttaatgctggaatatctgtatttatatcagacaatgtggactacagaaaaagtatcagggcaaaggggcaagaagggcggcgtgagcaagtggagccaggaggaattttagggcagtggaactcttctatgctttactgtaatcgtgcgtgcctgacattatgcatttgtcaaaactgctagaactgaacaacacatggagtgaaccctcacgtaaactatggactttcatggataataatgtaccagtactttcatccattttagcaaacgtactgcaacaatgcaaaatgctgataataataggggacactgtgggaggagtcaagggtctatgtaatatctctgcacaatttttctttaaacctatcactgctctaaaaaataaagcccagttttgttttgtttttaaaaaaagaggccacgtgcagtgcctcatgcctgtaatcccaacgctttgggaggccaaggcaggaggattgcttgaggccaggagtttcagactagccttggcaacatggcgagatcctatctctaggaaaaaaaaaaaatagcttggcatggtggtgcatgcctgtggtcccagctattggggaggctgaagtagggggattgcttgagcccaggcatttgaggctccaatgagatatgataatgccactccactccagcctgggcaacagaacaagactctgtctcaaaaaaaagagagaaagaaagaaagagagagagaaggaaggaaggaaagaaggaaattatcacaactatcgcttcaggcgttggctgacctagacctccaccccggccctcaccacctggccagtcggagccttggtcctctacatccatggggcccctactgcctgagctaggcaatctctcaagaccccagggctggccttggcggacagttctctaatttcattctgggtaaagggaccatgagcgagttgctcatggcaaagtcccagaggatgaacaagaggctgtgagtctcggtctgccagagggattctaggagagagaagtagcttaataagcaaaaggtggcaaatatgagccgaaagaaggccccatccccttgtagtagacatgcacttctgaagacggctcagtggattggagactgttcccagggccaccttgggaggcatgagggaaggagcttgggtcaacctgtcatacccaaagcagagtcaccctcactcaggacacttgctgaacagggacaaaccagcttcatagaaaatccatgaaattgtagactccaccagaaattttagactccatctacttatttctcctggattgttacattgaaaatccaggtctctcagtttagacctttggggagactcttcagtcctctccccatctgctaaccttgaccaaacacaaaggagagaggggcttcagaggagggtccctcggaccttggtgggcaggacccactttccctgtgcagaaggaaacttgaaatcaggagactgagcctcacccagggacaggccccaccactgtgccctgacaggcccttgtggacagaaagggacagggcgtagcctcacttcgaccctctgggtttgctgtggggccagctgggcctggtgtggctgagctccagagtgctgtcagccactcccagttccctcatgacctgggcagggaatataatatcacctctatctgtgcagtaagcacagcaatgtcagggacactgtttttagaatctggcttgctcccctcccccagcccaactgattatctgtcctggttgccaggcacctgtttgcattagatacagaacactccgcagggtcccgagtaggcagttgtggtccacaggccactggcaaacagaggcagagccacagaggggctgctcgtccccaaatgtctctccagccgctctgaagctgctgcgggctgctgtgctggtgatggctgagatcatgagatgagccccgggggtccctgggcatccctgggaggtcctggtttgtgttgctgtggtggtcttagtcattaagagatgacactttataaagaggaaaagagcttagtaaaagtgttgttctcaccagcaggtccatggagaaggtggaacactggactaaagagacaggctgaggaagccctcaagtcacccctgatggaggccagaccttgaatgttacaatccctctgcttatcgacccttaataaaaatctgagcaggtcttctctgcaggacacaggaggctttctggaaaaaaaaacatggaaaagtgagtctcctaagcgttcccaagtgattgatgcaggacacatcttaaaaggatgaaaggaggatggaggaaaacttcagaaggaaataacacagtttgaatgaaaacacctattttgcagaaagtccggaagtgctcgaccaagagatcgcgagatgggagcagagagtacaggaaaggaaggaggagaaagaaaggctggaaacctttgaatgcacaaaaaaaacaggtcatgaaagataccacgagccaactaaaatctctggctgaaaatgtgctggacaccatgcagttggaagatttcactagggaccgcagtgatgaggggaacttggaagcagagctaaagaggaaagcagaaaatgaagaaaccacccccttaaaaattaagtaaatttttttaaagttatgtgcatacattctgtatatacagaaaagatatctaaattgtatgcacgcagaaggagcattgcccccacaaggaacagttcatgctaaatggtgcagatgaagagactttgacaaaggaagtttcctgagctgtgggcagggatgagagctcagacaaatgatgggaagcctcccagatgccaaggtttcccacccccaggtttcaagggaggagagaggaagtgatgtcatctgagcccagtgaggccctgtcaagggaccagggaaaactgcccccactttttgctcccatcctctcattgactgcaggtgcacaggcagctgcctgaaagagggcctgcgaagtgcaagccagaggagttggcctccatggcacagagcaggcagaaaacaaatttggagaatgaccagcactcttgggtttatttgactgaaagtgcttgttttattgcattcactcacatccatttatttaataaatatccatggagtgtctatcatgtcttctgcactgttctaggggcttgggatacagagatgaaaaatgccaacccgatgaggcctgcagaccactagaacttacattttagtgatgggcaaggtcaggtaataaaagacaagcaagtgatgggaatatgtgctctgcagacatttccaatccagtgatgggagaacaggggctatgggagagcacccaggaggcaacatttaacctgagatctaaaagtaagaaggaggaccctaggagggtcaggggcagaatattgcaggtagaaggtacaggtaggataagaccaggagaactctgcctctgggtccaggggaagcaaagtaaagtggggttgtggggagtgtgcagagccctgtgcacagatgtgacatccagtgcagtgtgatcacccagggaagggtcttacccctcgagaggtggggttgcagggaagggggcatggaggaatgtgtatgccaccttgacctttttggttgtggagagaacggaataagaattgggggagaggcaggatttcagcgaggggtgtcacaggggtctgctgttggggtggtcatcacaagatgaatcaaggacagatcgggctgtgtttggatggttgtgaggatcagagaggaggaatgaaagacacccttgggtgctttcttataaccctgtgatgtttgtcactactttaagaaagccttagtaaaatctctgcaggagagcccctgacaaaaagtcagaaaggctgtagtgtattaattaccccagggaaagcctgcttttccctagcatagagtgtggtgtgccgcatgtctctcttgaacttgcatttggttcctgcactactcccacaacaaggacggtaggggcgggtacaggtggggctccagtgaagggtgggggttctcaggtatgatgcgtttacagcctgcattgaggctatatgatgcccctcgtttggagattccaagaggaattttaagtttattccaccagagtgcaccaccattaaataagaaagactcatgagctataagtgctcatgaatgtggtgggtgtacatgctggggctgtgcctcgctctttaattgtcccagcagccggctgtggtgggtaggaagatcagggcgggctctctggaggaggcggctcctgagctgaacactgaaggatgagtaggagctatctccagtgcttttcaaaattgaaggggcagatgaatcacttggagagcttgttagtaagcagattctgattcatcaggcaggggcctgagccttgctttgctcccaggtgatgcctatgctgatgagatacgaaagagggaggctctttagatcattatagggcaggagtcaaggaaagatgaagggacagggaaggaaagatgaagggacagggaaggaaagatttctggccaggacaaggcacaggcaaagacacgagggtgcacacagcttggtctaggggaacaggagagtttgtgttctggatccagggactcaggagggagggcaggacctggcagcagaacagatccccaacccacacagatgggctcttcctgctcatcctctccaacgcccctatctaccatgggtgatctttagcctcagaacactttatttttctgaggagtacaaaggaccacagactggaagtcacactggggaagcagccatggagaacgcactctgcctaaacacagcttgtacaaggaatagcctgaagacaaggtcaaaggcttcaaatcatgaaccaactcacgagctccggacaagctcatttgtcccatgagcaggatgtctgagggctcagtgaatcttagtgaacacatcaaatacaaatacaccttatgtctaagaatctgatgacaaatgagtatttttatcctctttggggtaaaataatgtgtattctgctgtgttcttgactgaagaggtatatatatacatataattatatatacatatgtatacatacacacatatatataattgtgtgtgtgtataggcacattatacaatgcaacacaacacctatatgcttttttatttcattctacaaatatcctcagtgaactccaaccaccacacgaggtacaaggttcaagaaaagatgctacataggttgcatgtactttttcaagggttcgaacacgctacttagacttctattttttcatttattcattcaacagagatttattaagccccttctatgtgccaggcaccaggcagatttgggagatactactgtgaacaagacagacaaggtcctggcttcaaagagctgaacttgactgagaggcgggtggtgactgaggcctggcggatgcagcggctccctgccaagatccctctccagttcagtttcccaggagccagggagggagctcgcctgctgcacagcatcgtcagggaaacttgtaattacagcatttattaggacagattagagagccaaaagaatcacattgttaaaggaacaatgaaattaaaaaagaggttaagcaaaaaccacaggagaaaaacccatgcattcgccagctattacaggctcacaagatagcagttacatgattgaaatctcctccttagcctctgatctgcttaggcatttttagctggaagagaccaatcatatctctagtcttgagcctggggccgtcttctccggctgtgggtacagttgggaggcagctttgcagaggccaagggccgtggtttgaccttgggcaaatgacttaatctccaggagcctcagtttacttatctgtaataattcctgccttgcaggctggccatacggccatacgactgagaaatcataagtgtgttgcgaccagcacatacattctcaaagagaggtaactgccagtcagtggtagaccaagccatgttagagcctgcagcaaaaggcaagttcagaaatacagatcctctttatttaaaatgttgttattttgtcatcaaggaatttattgcattaattttgattatatatatagcattaaaacagtatctatcttggctgggcgaggtggctcaggcctttaatcccaacactttgggaagccaacgcaggaggattgcttgcagccgggaattcaagaccaacataggggctctcatagtcccctcctcccccatgagatagtcatcatcatcctcattttacaggtgaggacatggaggcaccgagacattaagtaacttgaagaccacacagctaagcagccagagttccaatccaggctacagaaggtcagagcctgtgttcttaaccaccaggaaacacatggctttagacttttaccacagacacgtgcgcccaatatgcaaaccagccaacccacaaaaactgctttgcatttttaagcagttgcattgaagcttacagagtgttccagtgcactaggagccccactgacccatcccgggctggccaggtgggctcttctcataactgtgtgtctgcggcatctgaccctgcttgtatcttctcctggaggactttgagataagacttcatctggggacactgagagtccaatgaatggagacactaggacacccccgactggaaaagacagacggatgtgcacactgtcaccctctacctccttccaccacagacccaaggtggcacacaggaaggtgcacactgcaccaaaaaacagaaaactggaaatgtgaatgcacaaggggtcggggacaagaggacccaggaggaggctgggccaagagggggttagaaagtaccctgtgggccataggacttcaacagttcacacagttgagtccctaactgaggccaagctgtatgggccaagaacaagggaaacaagatcagggctgaagcatgccccttccttgggagaaacacatgtgcttagggcttggctttaaaagagattttccttgtgaaatccactcaggggcccctgaggaatgtcatggactgggtcttgatgtgactctttcttatgccactgcatatgacaagcactgcagcttccgaggcccccatggggaaagccctgagagagggatggaggctcccccatggctcccagcacatggaccctacctcctgggacacatttctggtctgtctaatgtgatggtgtcgcctctctgtgctgttcacctgctccaccccaagggtaggccctggttcctgtgcattttgcactcctcccagcaacgcaaaccagtgccacaaaggccctctgttgaacttgcagggtgcaaccgggctcctcagtggttgggaagaccctgcactgctgctctgacccccctctgtctacatggagggacatgttggggtccatggagaagtcaccaggtgatcaagatctgacctcccccatcccatgttcttccgtgggaggattaatcactgcctctctctagctcccctttcttagctaatctggagtcataaaacatcttagtattaggccacatccacacaagcagcaggtaagttcccttttacatatagcctctcccaggtattctgacgtgggcgtctcccccaccccagcctactcacagatttcagcatccaccctgagggtgtctgtgtgaagagcctgtctcctccttggccatccagggcctagctgctgtccagttattgctggaaccctcatcagtctggttgagtcacaaggaaaagatgttctgccccaggcactggtctggggaccacacattctccttctaaggttgtaacatggcagactcttcaccttccaccccaaccagtgtgtcaatcaaaggacagggccacacaggcaaggtagatcacagcagccagttattaggaaagaggactgaggttataatctcacaggccactcccacctggaagatggtggccttgttttcagggtcaggcatagtttaccaaaagacatttggaaaagggccttgttatttatagtttttaagctgtgcaagtgaagacaccaggaagagagcgctagggtcagagtgggttgagctggggttttcgctgttgttgttgttgctgccattactagaaaagagacaatgcaaaaacccaaggcattgcctcagagcccaggggtagggattctggactccctccacaatgttcaggtcattctaaagatgctgagagtccacgaggaatgagatgaaatgacagggccatgaatcaattcccgtggtgttgaaagcttcagggaggaaagctcctggctcacagctgggttttcttgggtcctcacagtaccgttgcgctggtctctgttgctacagcttcttggtggtggtgattgcagctccttggtggtggcagctgtgctctctgatcccaaaggaccactatggttccagaggaaagagtggttggagaacaagagcagttttcagcagaagcacttgtgactgagataagacacggaggagagctccatcctctaagcccaagtgagtagcggctcttggtgacagcaatgccaggccctacaccacttgcatttctattcactgagtgtctatggagggccaggcctggctctgtgctctacaagcccctcttggcattccttaattctctggggtttgtgtgtgatccctagtctatggttgagaagtaaatcagattcagaaagctggtgaggctagaacagggcttgaactcatgtttacagagaagcgaaccccagacccctttccctcttctctaatttgttcaatctttgtctctgtttgcctcccctctatcattctttatctttcctatttctctctcccttttctttccctcctctgtccctcttttctcttttttctcctttttttctcatttttctccttgctgttgtttgaatgtgtcctccaaagttcaagttttggaaactgaatccccagggtgcaagcgttaagaggtggggccttaataagtggtgatcaggtcatgaaaccctgccctcatgaatggattaatgtcattattgagggagcaggttagttattgtgagcgtggaattgttataaaagcaagttcagccctcacgctctggctctcccaagctctcttctgccttctgccatgggatgagtagcaagaagccctcaccagatgcagccccttgaccttggacttccaagcctccagaaccataagaaataaaatttttttctttataaatgacccagtctgtgatattctattataacacaagatgctcttcccacctcaatcaactttcactgcccaacccagttgcacatagactgagtatcagttgcgcatagactgagtacgttgctgggtcctggtcacatggtgatgcctgaatattctccctgacctgaagcctttgcaaatctgcttactaaactccatgaaaactgtgctcagggtttttcattgaaaaattcaggtgaggtgaatattttactcatctcttttcggttggttttaacttttatgtaacatttaattaattctttcaaatgaactctgtgaatacctaattcagggagagaagcttcaaaggagataggaacatgctgggagacagaggatgtactgggggtagggaggaaagggaaaggaaacggaaacaaaggaaaagggaagggaagaaaatttagcattccccagcatgactcaaggttttcctggtagttcctataatctttcaggaaagtagagccttcttcagtgagaaatctttccctaatattgaagtcaactttgaatttaaatcctttctgagccactgactatttactgacagtccttctgacctttaactgtgagctaagattttccatttgaaagactaatgagggatttattcctaggatacaaagatggtttcacataattaaatcaataaatgtgatacaccacattaaaagaaagacagacaaaaaccatgtgatcatctcaagagataaagaaaagtcaccggacaaatttccacatttttcatggtaaaaagtcccaataggtgagagatagaaggagtgtacctcaatacaataaaggctacatataaaaagctcataactaacgtcacactctacagtgaaaagttgggatcttttcctctaagatcagaaaaagacaaggatgcctactcttaccacttctattaaacatagttctggatgttctagccagagcaactagaagagaaataaataaaagtcatttgaattggaaaggaaaaagttacattgtctctatttgcagacaacatgatctcatatataaaatatcctaaagactctaccaaagaactgttagaactaatacatttaataatgttacaggatacaaaatcaatatgcaaaaatcagtagcatttctatataagaacaattaactatctgaaaaagaaatcaagaaaacaatcccatttacagtggcgcctccccccaaaattacttagatgtaaatttaaccaagttaatgaaagatctgtagactgaaaactataaaacatgaatgaaagaagttaaaaaaagacacaaataaatagaaagatattctgtgtttaagaattggaagatttaaggccaggcatgacggctcaggcctataatcccagcactttgggaagccaaggcaggtgttacacgaggtcaggagttcaagaccagcctggccaacgtggtgaaacccagtctttactaaaaatacaaaaaattagcctgctgtggtggcaggcgcctgtaatcccaggtactcaggaggctgaggcagagaatttgcttgaacccaggaggaggaggttgcagtgagccaagatcatgccactacactccaaccttggcgacagagtgagactccgactcaaaaaaaaaaaaaaagaattggaagatttaatattgttaaaatgtccatactgtccaaagtgatccaagagtcaaatacaatcctatcaaaattccaatgactttttttagcagaaatggaaaaaacaatccataaatttggatggaaccacaaaagacccatgaatggccaaataaatcttgagcaaaaagaacaaagctagaggcatcacactacctgattttaaaatctattacaaagctatagtaatctaaacagcataaaactgccacaaaacagacacagacaagtggagctgaataaacagcccagaaattaattcatgaatttatggtcaattgagctttgacaaagattccaagaacatacaatagggaaaggacagttcttcagtaaatggtgctgagaacattggatatccagatgcaaataaataaaattagaccctcgtctcacaccacacacaaaaatccactcaaagtagataagcgacttaaatataagacctagaaccttataaatactggaagaaaacatggagaaaaagctctaggacattggtcttggcaatgaatttgtggatatgaccctaaaagcacaagcaacaaaagtaaaaatgcagccgggcacggtggctcacgcctgtaatcccagcactttgggaggccgaggcgggaggatcacgaggtcaggagctcaagaccagcctgacctacatggtgaaactccatctctactaaaaatacaaaaattagctgggcatgctggtgggcacctgtaatcccagctactcaggaggctgaagcaggagaatccttgaacccggaagtgggagtttgcagtgagccaagatcgcgccactgcactccagcctgggtgacagagcaagacaccatctcaaaataaataaataaataaataaataaataaataaataaataaataaataaataaattcgcacaaatagaattcaatcaaaccaaaaaagctcccacgcggcaaaggaaatgaccatagagtgaagaaacaacatatagtatgggagaatatatttacaaatcacacatctgataagaagttaatatcaaaaatatgcaggaaactcaaacaactcaatagcaaaaacaaaaacaagcaaaaacaaatataaatcagttaaaatgggcaaagaatctgaataaatatttctcaaaaaagacatatgagtggccaatgggtatatgaaaagatattcaacatcactaatcagagaaatgcaattaatatcacaataagatattaatatcacttcacatctgttaaaatgactagtatcaaaaagatgaaagataacagatgttggcaaggctgtgtagaaaatggaacccttgtacactgttggtggggatgtagattaatacagccattatggaaaacagtatggagatttcttaaggaattaaaaatagaactaccatatgatccagcaatttaatttctgggcatatatttaaaggaaataaaaccggtagcttgaagagatatctatactttcatgttcattgcagcattattcacaacagccaagatatggaatcaacttaagtatccattaatgcatgaatggataaagaaaatactattcaacctttaaattagccctcatgctaatttatttagaaaaatttatttcgtatggttctggaggctgggaagtccaaggtgacggggctgcatctggtgagggcctttttgctacgcatcccatggcagaaggcagaaggacaaggtagcttgagagagcaagagtgtgagggctctttaaaagaagtaaattctgtcatttgtgacaacatggctgaagctggagggcattaggctaagtgaaataagccagacacagaaggataaatactgcataatctcacttatatgtggaatctaaaaaagtagggctcagagaaacaagtcatagaatggtggctaccagagggtagaggttggaggattgaggagatggtggtcaatggacacaaaattccagttaaacaggaggaataagttcaagagatctattatacataatgagaccacagttaataataatatactatacattggaaaatttctagaaaggcagttttaagtgttctcactccaaaaataagtatatgaggtaatgcatatgttaaaaagcttgatttagccattccaaaatgtacacaaatatcaaaacatcatgttgtacaccataaatatttacaatttttacttttcaatttgaaaaaaaaagaaaaatgaagaaagaaaacttcttgttggattgagttctctatcatcaacagggatggagaggttttagggaaagagaaaatatcacctctctcactgtaagaaacagattttattattactaacctagaacactgcattttctctttgttgttgggaaatttctgatgacacctttaaaaaaacctgagatttgtctctgggtaagttaaatgttcattaagtgatcacagaaagtaaaagtttgggaaactttaccaggagcgtttgggggaagcaaaccctgcgcagatttcctttgttcttgcaatagcagttccctcttgagtgtgacttggggcccctcagttggccctgggacatctgctcactttgggactctttgtgaacattacttggggaaggaagcactggggggaaggaagcactgggcttgggacagggctgggcgctgcctcttcactggaccatgacaaggttgttacctcaccaaggagaggtgcaaaaagcttaggggcttggatttctagatttcagtgccaactatgccacttactggctttatccttggggaatttatctactctgtgaccctcagtttttttatcttaattattaatacatacctcataatgtgactgtgaggattcacttaataatatatggaaaaccatagaatagtgcccagcatctaggaagtgccacagcccccttcagaagctagtgaaacctgcagaccacttttcagagtgatattattatttttttctaggtttactgagttataattgaaaaaataaaaatggaatatagatgtacaacatgaagctctgatgcatatatccattgtgaaatgatgaccacaatcaagctaattaatgttatctatcacttcacatagttcaacctttttttgtggtgagagtactgaagatctactctcttagcaattttcaaatctaaaatacattattattaacacagtcactgtgccgtacgttagctctgaggaccttattcattttatacctaaaagtctgtatcctttaaccaacctctcctaatttcccactgtcatccctactgccacctctggtaaccagccttctgctctgtttctgagtccaaccttcttagattccacatatgagtgagatcatgctgtgcagtgtttgtttttctgtgtctggcttgctttcacttagcataatgtcctccaggtccacccatgttgttgcaaatggcagaatcttcttcttgttaaagactgaataatatccctgtgtgtgcgtgcatgtgtgtgtgtgtttgtgtgtgtgtgtgtatcacattttcttcatccattcatccatcaatggacactaagcactaaggttgattccgtatcttggctattgtgaataatgctgcaataaacatatgagtccagatacctcttcaagatactgatttcatttcctttaaatatatgcccagaagtgggattgctggatcatatggtagttctatatttagtatcttgaggaatttccatactgtttttcataatgattgtagcaatctatattcccatcaacagtgtacaagggttccattttctacatggccttaccaacgtttgttatcacttatctttttgataatagatattctagcaggtgtgaggtggtatctcattgtggttttaatttgcattttcctgatgattagtggtgtagagcatcttttcatattcccattggtaattcgtatatcttcctttgagaaatatttattcagatcttttgcccattgttagctgagttatatgtgagttggttttggtttgttgttgttttttgtttttgctattgagctgagttccttgtatattttggatattaaatccttctcagctgtatggttgacagatacattcttgcattctgtaagttgcatctgtaggttgcaacagagtctctttactctgttgattgcttgctttactgtgtgaaagcttttttagcttgatgtaattgtgtttgtctatttttgcttttgttgcttgtacttttagtgtcatatccaaaaagttattgcccagaccagtgtcatcccctatgttttcttctagtaattttaaagtttcaggtcttatgtctatgtctttaatccattttgagttaatttttgtgtagggtttaagataagaatccaattttatttttattttttgtatatggatatccaatttccccaacaccatttattgaaaattctatcctttctttgttgtgtattaacatcagaataatatttttaaatacataaaattcagaagatgacaaaggaaaccaattacattgaaatgcatacagagttataattctgaaagagcaatatatgtgcctctttgtaaacacatcatatatcaaactgcagtgaccgttctaacaactattgcaatttcaaagtcatgttgagtaggaggagtactttgagattctgaaacaacgttcttgtgctatgaaatatccatgattttgattggtgatggtatcccaggtcttgttaatgctgctgtaatctgttgcttccattccatagttgaataaaatgcttgatatctgttggaaattagtaaaaataaaaacgtatttttttccatccaagttcattctcagaccctgaagagtcacttctctggattctgcagcaaagttcccagctggggcagcaagatttaggcaattgaaaagaacatacaccttgttctcagtggcaaaccacatggaaagctttaaatgtcagagaagaattctgccattttgctgacttttttgtagttctcctaataaacaagtgttaagtgacaagcttttcagaggagataattttcttccaagtggtctttttatttacctgaatattaagttcaaagacactctagtctctcaaaggaaacctgtgggtggagtgttttttaaaatgtcaaattccaaacgaagctgaagggcacagcctcaagaaggttctgtgttcaccagtgcacagggacgtgtcagccctttattgccattgtctacataacatttttcaagttctctgagttgtgaggctgtcagtatgaagactcctattttttctgctattaaatttttttttcctccaactttttctttttctttttcttttcttttgagatacaatctcgctctgtcacccaggatactggaatgcaatgcagccttgaactcccaggctcaaacaatcctcctgcctcagcctccaaagtagctgggactacaggcatgcactgtggtgtggtttgtctctgtgtccccacccaaatctcatgttgcattgtaattcccagtgttaggggaagggcctggtgggaggtgattggatcatgggggcagatttctccgttgctattttcgagatagtgagtgagttctcatgagatctgatggcttaaaagtgtgtggcacttccccccaccccctctctcctgccaccttgtgaggaatgtccttgcttctccttcaccttctgtcatgattgtaagtttcctgaagcctctcagtcatctttcctgtacagcctatggaactttgagttaattaaacctcttttcttcataaattacccagtctcaggagttcttcatagcagtgatgatgaatacacaccatcacacccagctaatttttctttatttttttagtagagatgtggtctcactatgttgcccaggctgttctcaaactcccgggctcaagtgacccgcctacctcggcctcccaaagtgctggtattacaggcgtgagctgccgcacccagccctcctccaactgctgctggttgctatcataggttctcactgggtgtccacctaacatgtcccttcaggaaggctggtgtcctgacattcggtagcggaggcctggtgttgagctcacctgcatttctgcccccttctctggctttctggggatgccctcctcaacctgaaaatgacttccaactcctcagcacagaagtgggcacgtgacccaagcaggtccaggattccataagatcccaaacacaaaggatcctgtaatcctggggctccagtggccgtcttgttccttttggagaactaacctattgcagagaaagtagtagagctaaaagaaagagaaagaatcctgatagcatctgtgactctggatccagctatccataaagcgccatacgctaatgcgctcaattacccaagtcaatgagtccccttagaagcttaaggcagtttgatctgagtttctgccactttcaggaggaagaatcttattggtatattttataataatccggctgatatgcaaactgtcttcaatagaatgctctgtccagagtcacagtggagtccatcgcaacaaataaggtcagacagctcacagctacaactgggctcatgccttccaagtatcaaagtcataacaaacttcctctgtgtgagtccacaaggcattcttcctctgggggaatcactccctttccattgtcctgatactccctctgtggggctgtagaggagtgcatggcttttgccctacttccaagccttctcagggaacacagcagggacaaagagctgaaggctcagccttggccatggcccatcaggcccactgcaggcttctcctgggagaagatccagagcctcgggctctgggctcccatatgcagggagaacctccgaccacagaaattggaaggagctaccactgcctaggagacatcttcccttgagctttttcaagggctgaacaaacagagcccacacttgttcacggaatccatgggcctcagcacatcagagagaggagaagaaattgacccagagtgtaacccacccccatcttcgggccccaccaagaattgtcagtgatgccagaggaagaggcacctaattcaacagatcaatggagactcacatcacccacaagcaccacttatctgctatttcatcccacaccagtacctgatcatcaaccgttgcaaacactcattgctgtaattgtatcattagtttcaatcacagccaatttggggctggcatgtgaatatccttttctgttcccactgctgatgaaatttcagaattataaggtgaatgaaacctagtagattaaagtaattgtgaaactgatgctaaagaacagtcctgttccccatgccgcctaaacatgtaatttcagacatcaaacagaatctttaagctgaaataaaatctctacttagtctagcaccattgtattctctgtatgggatgaaggcagctcttaccccatctattaagatttattattaaaattgcctgggggccgggcgcggtggctcacgcctgtaatcccagcactttgggaggccgaggcgggcggatcacgaggtcaggagatcgagaccatcctggctaacacggtgaaaccccgtctctactaaaaatacaaaaaattagccgggcgaggtggcgggcgcctgtagtcccagctactcgggaggctgaggcaggagaatggcgtgaaccccagggggcggagcctgcagtgagccgagattgcgccactgcactccagcctgggcgacagcgagactccgtctcaaaaaaaaaataaaaaataaaaaataaaataaaataaaattgcctgcgaattaaaaaaatacattttttcccttggcaaagtcagcacctagctatctcagttaactctctggaggagaaaaaggggaacagtggttgtgaaatttgagacttgcaagagtgcccaggactgcctaggcatagactagactgttccacctaaatactcccatagaaaatgccctaggtgaagtctccaggtgcagttttcagagcaaggccctcacccagttcttcaggttccataatacattagtgaccacactaaatcttaaagtccttgccatcagttgacataaaagtccagtgagaactctggccttaccagtgaagactaagccccaagaaagctgtgtgagctgttgtatgttgagtcagcctccagccagtcttctacccattgctagaataacaaatcaagtctcctccttcaactgggactcatgtgatcgtcaccctccttgaaagacagccctgtcctaaccccctccagagctgccacatccctggtccccaaacaatcaagtgaggagggaaggctactggccacccacaaggccctgaaagtacagcgtgttgactcaggaataatccaagcctatggcaggaggaacaggactttatggaagctgggagactgaagaaggagtcaccatggcaaccagctctccagctttcattctcctccccatcacttgatccagacattctccttccagatcataaggcctgacatccatccacttcctatcatgtggtcacaggcagatctctctacccactggcaaaaagtgggctgatggaaatgagcattgggtgcatggtgcttggactgggtttcatagttatcgctccaaaatccatggcctcttcggaacctcagaatgggaccttatttggaaaaagggtctttacagatgtaatgagttagtataacatcattctgaatcaaagtgggccctaaatccaatgactggtgtcctctataaggaaagaaaacagagacacagagacacacagggaagaagccaagtgaaggccaacgcagaggttggagggatggagcaacaagccgaggaatgccaaggactgcagcaaccaccaggagcttggaagaggcatagaagctactagaaggagccaatcctgccaactcctggatttcacatttctgatctccagaaccgtgagagaatacatttctggtgttttaagccaagctgtttgtggtgcttactaagccagccacaggaaacacacacagggccacatgaacacttcaaaatacagccattgcgaaacctgaaacctggaatctaattagcctgaaccagccattaaaagaaaaagtgatgtatgcctgataaccattctccatatttttataaggagacagaaccagtaagaaaaagaacatagataaattaattcccccgttttacaagatatttattttacaagtaaccttccagggaattccctggtatgaacaaatgcatgcattatgaacccatccaatgatattgagttcactgctggaatctgggcaaaacactgcaagttgctcggtgaaaacaggtccaattgtgtttggtttgctctaagtcagctgcagggaggcactgctctgccacaagacaggagggaggaaagctggggaaatcagataggtttccttgttgcaggtgtgttcaaaggagggttggagcatcttccactgacttcacctctatgaagctcctctcctgtcttcgtagtgagaacagagatggctgtaagtcaaacacgcccggaaaaggcattcgtggaccagaccatccatgcactgtgttaactgaccacttagggcgagcagcgttacaggcctgtagttgtggaggcaggagctacagggacatttctgatgtggctccagccctccacgatggtatgatccagttgaacccagaatcccagcacatgtggaccagtcaggaagcaactgactgagagcggtagaggacccaaatttcttcggaggtatttacttcgttgagaaaacccacagggcagctccaatcccacatccctggcatcctgtggcttatgggcgtggggccacttgcctgttggaggcgtgatgcatgatccccagtatttgctctgcaaggccaggcatgggctcaccgagaaacaacctcgcctttgtgttgtcctcctcctggacaatccatgggacaggccggccctttggagggcacttcctgggctgtccatccctcactggggaagcaagaaggctctggattgcctgccccccagccacctgatatgagttgggcacagggagtggcattagcctggggcattaatcccctctggtagatgtcccaacaaacatgcaccaatcagagacaggggcagggcaccaggggaaactgtagtctcctttgctttgaatcagttattatggaggactttatcacaaacacagaattacattcccaaatattcattcttttcaacacaaagcttaaaaggtattgcagtttgaattgtagttgagacatgactctgtagtacccactactgcataaggttcaagtccaaaatgatccacagtctttttcttctttaatattttctctttttcactgagatgtaacactgtaccttctattgtaggtgctccaatctcaggtataccatccaataatgtcttacatatgtctacagccatgcaactgcctcccagagcaacatctcagacatttccaggctccagcagacttcctgatgttccttctctttcaatacaaacctccagtcctacaggtaactgctattacaacttctagtaccatgtgttattgagcttcatatagatcggaattgtacaatgtgggctccttgagatctgctttcttctgcttaacgttatgtctgtaaaacatctttgcatggggcaacagtttattttttcattgctatgtactattccattgaatgcatatgccccaatttatttagttcatcctaacgtggatgggtatgtgttgttttctgtttgggactatgatatataaaggtgctaggacctttctcacacatgtctcttggtggccacagccctcgtttcttttgagaatatgcccaggagtttctggggcatggaaatatgtatgtttaactgtagtagacacctccaaactcttttccaaaactgaaccaatttacacttcaaccatcagtgtatgagagctcttgctgttacccaccattgtcaacacttgttgttgtcagtccttttaattttagcctttctaatggatgcataatggtatcttactgtgggtgtaatttgcattttcctcttggctgtaatactgggcatcttcttatgtgctattggccacttgtattttcctctattatgggggtctccgtgaatcactctataaagggcctgacagttaatatctctggctttggaggtcatatggtcttgtccctactactcaactatgctgttgtcaagcaaaagcagccatgggcaatgtgtgaatgaatgggattggctgtgttccaacacagcttatttataaaaacaggctgggatgggaggtggattttgctggtgaggctttaatttggtgacccctgctatattgtaatgtgcctgcccaagacttctgcccattttaaaattaggttgtctttttaatttattcatacaagttctctgtaagttctaaattccagttttatattcttaatcatttatcatgttttgaaaattaaaaaaaaaaacagttattatgttggaccattcctatagcttttgccctgtgtttctaccatagtcccctaagagatgagatcactcttgtgaaaagagcttcctgctgttacccaagagagctgtctgctgccatctttgccccagcatgacagtgtggcagcccagcccagagcactgtggctctgcttgtagccttggggagtcccactgcctagaccaggctgggtgaaaatagcctgacttcttggaatggacacagttttcaaaaggagcataaatttagtctgccaattcatgtatatgccatgatggtcaaaattgagggatctgggcaaagattccttttccattcttagccaaatgctttctaggttgggcatcagttgatggtgcaattgagaggaaattgcccaattattttgttgcttcactaacaaaatgcttactgtctttgcattgtaaaatctttttttcatttataagctccccaagggagcaaaagccatgcacagtggtgtgccaggagccctcatgattgttttgcctgttatcttatttgagcaaatattagtatctcattttgcagcaaggaaactgagggtcagagtagttacatgaattgatcgggatcaagagattaaataattgaccaagccagaaatgttttactccaaagtccatgatcttccccatgggcccatactgtggtttccctttcatatagagatggggctggaagggccattattgaatatctggtcaagttccctcacttgatggatgaacgctgagatctggaaggagtcaaccaactcatcacccaaggttcccccaacaagctagcagcaaagcttggatgagaacccagatttctaagttcaaagtcttcctcacatcttcctttatttaaataattttgactgtactacatcaacccataacacaagctatataaaaacagcaatttgtttttctaagactatacctagtgtctgtaatagcatcaagcaattgagatgttccatttgttgaataaatggatcgtaagacaataagtagtaggtggtttgattacatcctgcaaagaagttttgatgctcttcctacttttcactccctcttaagtcttcattcaagacaaagaagctcattggatgcccaatatcagccaagaccaaaggccaaaaggaaatgcacaacatcaagcctttttttcttgttcagtaataaaatctatagcaatactataatttgtttcctttacagatactttaatcaaaaagaaacatatcaaaatatggtaaattctgcttgttcattcaagttatccaattggctttagaatgccacttatccttactttcaattgtattcatttccaaatatacagcttcttagaaatgtagggacactatcctcagcccttaaatgtggaatttatcaacccctgtattgtttatttttgtgcaattagcaacatcacttctggggaaaaaaaaggacttttgggactgataaatgtatttgtgacattttcctctaaatatcttgcttctttatgcatcctctcattttatactgagcttggtctaggggaagttcgggtaaacagatctcttatgagtaattagtgtccaattaagccaaggtttcatgtctgtgtgagtccagcctctttttccaacctctgggaagaattaagtaggtcaggtctctgtttacaaagcaagccccaatgctgttgactatccaggggattttacaagttattcccagtagctgaaccactagataaagctactcaaaaaatttgtataggcctttgctgctgtgcaaggggcaacgttgaccatccagtgatctaggtccttcctttctgcatttgtcctgtgggagtttccacagactgttacatcaccaagaagcttcatcctgaaacaaaaggaaggtcacaaccctgatctcatggtcaaaagatcatgacactatccttcccatcataagccctgtttcaaatgactcaacttgaacggcagctgctctactggcaatcttttgtgcatgatttattttttccaactttgtattccaaaaattttcaaatatacaaaaaagataaaagatgaatacgaggaacatttgtatactcaccacttagattcaaaaatcatcgacatttggctgaaccgtttgaaagtgagctgcactttaaatatttttgcatctatcgcctgagaataaaaacattctctctaatacgaagtaacactgtaacaaagaattatttaagttatcaaagtagtcaaaataaagttgttcataatattttcttattatcctcttaaagtctgtaggatctgtagtgatgtgtcactttcattcctgatgcgggaatttgtgtcttcgctctttttttctgcataaatctaattagaggtttattaattttattaatttttccccaaagaacctgctgtgggtttcatttatttttttagttttggtaaatttaattcatgtctgcttttatgtttattatttcccttttcctatttttggatttaatttgcttctttctagcatcttgaagtggaagttttgatctgtttgtagccatatcttacctattttaatatgctgcgtttttgttcttagttagttcaaaatatttttgatcctccttgttatttctgctttgacccatgggttatttagaaatatgttgtttaatttccacatatttgggggctttccagattcttctgttgttgacttcttattaaattctattataggcagaacataaactttttatgatttcaatccttttaaatttgttgaggcttggtctttggctcagcacatggcctatcttggcaaatgttccatgtgcactggaaaagagtgaacattctgttgctattacatggacatatttacatcaattagtcaagttggtaaatagtgttattcactattcagtaaatagtgttgctgagtttctgtttacttcttctgtaagttattaggaaaagaatgcagaaatttccaactatgattgttgatttacccattcttcccagtttatcagtttttgcttcatttattgtgtgcatacacatttaagattgttatatctttgtgatgcattgaccctttgtcagtataaaacgtccttcttcatccctgctaataatcatttttctgatttctgttttctctgatgttaatacagccagtcttactttatttttattatttgcatgaaatatctatttctatcttttacctatttttgttatcacatgtgaagtgaatttcttggataaagaaaatgtggtacatatacatcatggaataccatgcagccataaaaaaagaatgaaataatgatctttgcagcaacatggatgcagctggaagccattattataagcaaattaattcagaaacagaaaataaatattgcatattctcacttataagtgggagctaaacctcagatacatgtgaacataaagatgggaacaagagatactgggaactccaaaaggagggaagacaggaaggtggcaagggctgaaaaactttttattgatactatgttcactatctggatgatgggatcaatagaagcctaagcctcagcatcacacgatataactaatcttgcaataaacctgcgacaaaccttgtaacaaacacataccactcgaatctaaaatttaaatttaaaaatttaaataataacaataattaagtttcttgcagctcgcacacagttttgtctttcatttttaacaagctctgtcttttgattggggtgacatgttatgtaattatcaacatggttgaatttaaatctaccatctcccttttttttctattcgtctcatcccttttttatttcttttcccctaaatttccactttcttttggaatatattttttctactctatttatagacactattggctgataagctatagtcttttattattttaagtagttcttctaagatttacaatattcaaatttaacttttcacagtccatatagatataatattatgctacttcatgtataatccttaggacatcatatttctatttttgcctgctatctttgtgctattattgtcgtacactttatttctcaccttattttaactgcaaaatacatttctactctttttgccttaaatattacattatttaaggcaaataatgggccaggcatggtggctcatgcctgtaaccccagcactttgggaggctatgtgggcagatctcttgagatcaggagtttgagaccagcctggccaacatagtgaaaccccaactctactaaaaatacaaaacttagcctggcatggtggcacatgcctgtggtcccagatctccagaggctgaggcaggagaaccacttgaactcaggaggcagaggctgcagtgagctgagatcacatcactgcactccagcctgggtgacagagcaagactctgtctcaaaaaaaaaaaaaaagaaaaaagaaaaaaaattaaattatcttttaacaaaatgtttaaatgaggcaaaaaaccctttatatttactcaaatatttatcaatatcagccctttccattcttgtgtatacatccaagtttctatgtgatcgtaggttttatattcccatgatttaaaggacttgatttaaatttattgtagtgtaggtctgctggaagtgaattcttgtagcttgtatttgtctgaaaaatattttatgtgacttccattttcaaagaattatttttcatgaatatataattataggttaacaggatttattgtctatctatctattgctctttaaagttttctggtctgcatagcttctgacaagaagtctgcagtcattcttactgttcctctgtacatatatctattttccctctctgcttttaagaatatttctaccacttgtttttagctatttattataatgctttattatggggtgtgtggttggggggtgtatgtgtgtatttattctattttgggtttgttgtgcttcttggatctctagctctgtaattttcatccaatttggagacatttcagacattatttcttcaaatgttttgtcttttctctttgaggaatttcagttaccattacattagatgactttatatttttccacagatctctgtagctccatacaatttttcttagtcatttttctctctaggcttcattttggataaatcccattgctatatctacaagttcattgatcttaaaggaaaccagaatatttcaccccaaaatgtggctgagctaaagaagcagtctcaaggtctctttgatcccttctcctatctctcaatcctctgtctctcccaaagcacaggatgaagctgctctccaaagttcccttatctacctagaaactggacctaccaaagaggaacacacttttcttccctaaaatttcattaaccagagaagattaaaactcatatcaaaaggaagagactgaaaattaaacaccagatgaactcatcccaaaccgttgtctgctgtctgtcctctccaatttccaaagactattatttactagccattgtctgagtatgaggcccattcattttgcccctgaaaatcacttactatccctcaaaccatccacatttcccccatcttcccttctgctatgaagaagagtatatacgcatccataccccattgggtagtcattttcctgcaattcccctgtgctatgcacattaaaataaagtttgtatgccttttttctcttatgagtctgcttttctctgttgattttcagcaaacagtcagaggatgaagagggaaatgttccccctttactcttatatatttggtgctgtgagcagcatatccaaaactgctctgcttttctggaagccacaaccaaaggaactcaggacctgagaggccaatataagagtaagaaactgttaccagactcctagtctctctctgtggaatctggtaccagactcccagtctctctctgtggaatctggttgagcagatggtaaaaattactttttgtctatttttcctttttacatttaagattaatgggagaaaagcatttgtatgactattgttaggtgcggtgactctggtgtatttttggtatgaatattcatattgtctgatccatttatgcccagaaatagtctttgctttttgtttatctttgtctccctgtgtcattttgtcataaacaggggtaccatagggtagaacataggcctaaaacataagcctgttgttcaagccagcttccacagaccggtgagttttatagttctcagcagacctccagcacctatttagaaaaattgtgctgcgggtctccaaaatgaaaacagaatgaggttgccctctccttttgttttatgtccttgaaagctttctttgtgaccaagtgggagcatttctctttttggtctctgctatccagggtgtgtgattttcagatcatgtgtggtggccagtctgaaaggactgggacacccaagatgcataaaattttaagcagcgtgctctgttgctaacatgctaggctctcaggatggtttgtcttaataaggagcctcatccacaaggggctttgttgtctcaatctttgttgcctggttagtgctgggcaaatccaatcccagaagttggtggatctataactgatggtacagccgagtgtccatgtgtccatgtacttgtgtggagaacagagacatcattcacacaaataccatccttaatcacctgtggcaacaaagatcttttgctatcttagcctatttctgggagtgaatttttggggatcatggaggctgcatcttctatgcctcctgatcttcccataaagaggcttattagattgagttgctattaaaataagtacaccattggaaagtctaatcatcaatggccagataatagttttttgaattagaaagacttatatatttgaaaacaaaatttgaagatctcttgccctaagcagttgccttatttgtattgatgagagaaccaaattaaaagaaagacatgtaatattgggatggctagtcttaaaaattattctgacaaaattaaaaagcaaaaatttgacctaaaacaaaagttaaaattctttgaacactcaaactgccaactttgaatttccaggggaatttgtaaaaaagtcactccagcctatggtctggtatttaagattctgtgcatttaccactgtggtctgggtttgatttagttctctggtcagggaatcggccccttgaaaatgtaaatcctttaattcagaaggaaacatttataaaaactagtttgaattattcgttttgaatttatatttgtatgactcaacatttgaggtacccatttgtttgtattctttcttctcatatagacaacttttcattttctgttgtctaactaactgtcgcttttaattttccatctatggggcacacagattgctgggccattgtgtgtagatggacagctgagaagtttggtctctagaaaatatgaccagacagagatgtgggctgtacttcatttgtgactggtgacactttccttgctttaagctgtcactgggaggggtctagatcttggaagggttgcaacttttgcttctcttttggagacttgggttaaacccataaagggcttcttggttttattctcatgtatgcttatttgttttggttttgagtaattcacttaggaatacttctggtttaaaactctatttttagaatgtgatagcaagttttttttctgtttatcttgcatcctctactggatcagagagatgtatctcccaccaccactgggaaccaaagaccttcttaggtggcaaaagagaggtgctgctcccaccaccactgccaatgctcccctcctcagtctctcagctctcacaaaaggctggctgctcacataacagaaaatttgctgcttgtatttttttttttttaattttacagagctctatggtcgaaagtcagtttaattaaaagctaatcttctctcttctcttttaaattctatctctcctatggaaacttcttagtcaacaagacccctcttttttgaacccctgctaactaaaacttcattgaccttttgggaaacttaagattctcccaaactgactcccctaagacttggtccatttactttttctcctctttccttttggcaccttcaatctttcatccagttaatcccctccctccttcatttggtaatcagttgataaaaattactaaaaggaagcaacagcactctggccaccacaaagatctaaaggaaactttcagcaatgctgagaacccgagcagaacacagaaaaggcactattgaccctctcttttggggtcctctgtcttcctcatgagcctcaaaagtcataatcagcttcttctcagatctaaaggtctgctctcttttgcactgaattcctggatctctttggtttttagatacatatcatgtatgcatgtggtggtgtatgttgtgtcgacatgtatgtagattattatacctgtgtttctatattgtctacataataccaaattgatcttaaaataaacactcttgaattaagtagataagcttaaatgctattcaagtttacatgactgtaataaatctttggtaaataaagctaatttttaaattgttggtaaaataaaatgaaaatgccttcagaattgtcattattaatgcgacgtttttgcctgggtctactggtcagacagatttatgctgtctcttatagacattttaaggttacaaaattgttgcttctgtgatatttttaatacttgcttgatttgtctgtgagctaaaactgtgctgtgggctggctgctgggtttcccccaaccttacatacatcttactgtgagcttatatctttggttttgagcttctggattctgggctctggacaggtggctatggtgaggcctggggacacgtgggtctacagtgcctaagccaccagctgcagggcagagccaagcccaatacggccccgtcttccctggcccagctatacctcctggccatgctcagtggggttggatcctctagacattttcttcaaaagtctatcctctgtcctgggctctacatctgatatgtaactctaggacccagatgggccctgcccttcagagctttcctggatacccaggatggctgtgggagggacattgcggggggtgtctgtgcccagtatctcaaaggccttggtaggataaactgcttgctgacacaggattagcctcgtgttgccttttaaaaaatagaccagacatagtgactcacacctgtaatcccaagactttgagaggccaaggcaggaggatcctttgagcccaggagttcaagatcattcctggacaacatggtgagacaccatctctacagaaaatttaaaaattagctgagtaaggaaaaagaaaaatattagctgaatgtgatggtgtgtacctgtagtcccagctacttgggatgctgaggtggaaagatcacttcacccttggaatcaaggctgcagtgagccatgatcatgccactgcacacccgtctgggtgacagagtgagaccctgtctgaaaaaaatgaaataaaataaataataaattaaaattaaaaatcacttaaatggctagctttattttctatgagcaattcaaatataattgttaagaatgagtaaatcaggtaaatgtaaatgcaataaacaagaataaaagttgtcatcatttcaaaaacctttttagtaagttaaaaggtttttagaaaactttgagaacataccattcattggactggttaaaattccagaactctaatgaaaaaaaaattgactcataaaattgctaacctaatgtcaagcagaacaagaattaattacatagagctgaaatggtgaaggactgaaataattttttatgattcttttgtttgaaacattgcttatccttttcaagttttatttttgagagttaagaaaactgttttctcttaagctatctatagctttacagtaaaagctatagacaaagtatatttctgtgaaaaaagttgaaacatttacctttctctctacctgatcccttcagaattcagaaattcttcatgagtattcttactttatggctttacaattatttcataagttcagtaagaactcattctcttttataacaagacacaactggaaacactggttattttaccaaggctctgactgaaatacaatatttttagatatgatcagattgctttgaggactgaagttgacttttgtggagctgataaaatgtcccttggagagactggccttgtaccttgtctacatgattcccttacaagcttcctgattttgtggtgagtaatgaatgtcaccttatgacaggcccatgaacctcaagttatttgagggaccttgagaaaagaggtattcatccatttatacaggtattacagacacagtctgagactgagtcagatttttggcttgacttcttaacatagctaggaagccaaggggctttttaaaaagtctaatctgagattctttatgaaaatattccagcaaagccaacttagaacaagcctataggtcattcatcattcttactaaacttttgtaaataatcaggtcaaagactaaacttaaacaaaacagtctgtctatgattatctttggttgaaatgggaggattcgagagaaaaaattatgtcatagaaaaaaacttcacatatgcctgttattacattctagccttgtccatttgtttctgagctttgtatctggactgaatcacacatttttattttcctccaatatatggctgagacactcagactaatgtttccaatttttcttccacccttctgacttagaattattagaaactaaaactgcctttttcctgaggctgaagctagtcaacttggctttgaaggaatattattgcaacagcttatatttggacaaaactttctacacgcaaaatgcaggctacaaaaatctgtcagattgccactaatcttctcaactgactgtcctccagactctaaagaaactagtttataaattatttcacccattaacatttgttttttgtttctgtttccataaaagccctcttattaaagctctatttgcctacatcatatatagaggcctagctttgagaatctatctacaatgccatcttttaaaatgaaacacacttgtttaattggactggccaatttccagaaataagagactagtttaattggatttttgaaagtgcttagatttgttctttctttatgtattcattctcatcataatctatgttcttttctccctttacagatcgcttgccactggattactaatctgatttctctctccatagctaccaatcctactttaatatgtgaaaccttttgaaaataaagcttcaaacaggagactaaaaaatcaatatttcaccccaaaatattgctgatctaaagaagcagctcaagttctaactccttcccccatctcccagtcctctgtcctccccaaagcataggataaagctgttctctaaaattccctcatctatctagaaactggacctaccaaagaggaacacaattgcctgcctcgaaattttattaaccagagaagactaaaattcatatcacagaggaagaatcccaaaccatttcttctttctgccccattccaatttccaaatggttagtaaatttccaatttactaaccattgtcggaccattaggcccatttatttccacctaaaaatcatttattatccctcagattgccacacttcccccattttcccttcccctgtgaagaaggggctataagtatctgtaccccattgggttattgggcaatcattctcctgcaactcccctgtgctatgcacattaaaataaagtttgtatgcctttttctcctactaatctgccttttgtcagttgattttcagtgacctttcagtgaacctgtaattttttcttctgtattattcaatttactcatattacttccactaattttttaatttcatttattgtatttttcatcacttgaaattgcatttggttcttttaaatttattcaattctgtcctcactatgtttttattttcttttaagtacctaaatgtatttataatacctgttgtagggtccttgtctgctaattccataatctctgtgtattagtccattctcacactgctataaggacatacccaagactgggtaatttataaaggaaagaggtttaattgactcacagttcagcatagctggggaagcctcaggaaacttacaatcatagcagaaggggaagcaaacacatccttcttcacatgatggcagggagaagaagaatgagagccaagtaaagggggtagccccttataaaaccatcagatctcgtgagaatttactcactatcatgaaaacaggatgggggaaaccacccccatgattcaattatctccacctggtccctcccacaacacatggggattatgtgaactacaattcaagatgagatttgggtgggaacacagccaaaccatatcactctgtcctttctgatttgcttctaatggttaatatttctcctagttattattcacgttttctttttgcttcttgtagtttttagcaggatactataaatggtatgttttggggcttgcattttgccatttccctttatagagtggtgggctttgttttgaaaaacatctaagtcatttgaagattagactgatcccttggagacctgtttttgtttaaagcttttctagggtagatgtagaataatgttgctccaccaataatttggtcctatcagtactgcgtgactgccctggggtactcagtgaccactccagggtgttgctgaggactctccactctgacaagccagaccataaacatctgccttccttgtgtgatgggcattcagtcagctcacagctcactggtcatgctttgcccatctttgttgacattcactctgcacaggaacagcctaaaactcagcaaacactcatgaagaccctctgcaaatttctgcagtggtttctctgggtagttccctccactttggaaatcatctttacaatgtcttataggttcagcctccttgaactctgatctctatcctttcaactctgaggccactgggccccgttcgggttgctgcttctgcgaccatggtctgaaaaacgcctccaggtagaaaggtgtttatctgttgttagggatcacagtactgtgctatctattgtccaatgtctgaatacagttgtctaatctattttgtcctgtttcgaagctttttataggaaaagaagttcatgtcttgctatttcctcatggcctgaggtgaagtcctccttattttgttcacttccctttgtttccataattatttctcccttatcatttctttatatttgtgttttctcccttattttcttaaataggtttgtctgctttgttgtttttttaatgaactaaatttgaatgtattatacctactgttttttaagtttctaactcattaattgttgcttttatctattatctcctttcttctgatttttttttgagtttgcttcctaaaatctgttgagtttgaaacacttatatattctgtttttaaatttttttaaatttttactgaggctaggactatacttcatataatgagtgtaccatgaataaatctgtgtcaagtgaacaatcttcttggtgacattcaaataggaatctcatgcattacttttttaaataacagctttattgaggtttaactcacctatcacaaaattcacctttttaaggtttacaattcagtggtttttaatgtactcacagagttatacaacctcaccactctctcattttagaacatttttgtcaccctaaaaagaaaaactgcacccatcggcagtctttccccatcttaccctcagttcctggcaactactaatctgttttatgtcccaatggacttgccttttatggacatgcaataggaatgggattatacaatttgtgacattttgtgactggttcctttcatgtactgttttcaagagtcatccatgtttagtatgtatcagtactgccttcctttttatggtgaatgatgtaccatatttgtttatcttttatcagttgatgcatatttgggctttttgactctttggctattatgaataatgctgctttgaacatttgcatagatgtttttgcatcaacatatgttttcagtactcatggggccgaattgctgggtcatatggtaactttaactttttgaggaattgccaaacttgtttccaaaacaactgcataatttaaattcccaccaacaatgaatgaggggtccagtttctccacatctttgtcaacacttgttattgtcttttttttttttagtttaaccatcctagtggtgtgacgtgtatcacattgaggttttgatttgcatttctcaaaagactaatggtgggcatctttccaacgtgctattgactatttgtatatcttacattttatcttacattttcaattcttacatctagacttctgtaagaggcctatgatccattttttttatgatccattttgagttaagttttgtgtatgctatgaggtaaggtcccaacttcattcttttgtatgtagatatctaattgttccagcaccatttgttgaaaagccatgcagcatttttgtcaaagaaaaaagtctctaatatataaatggctataattttatgaaatcatagcacattgcctctagaattctgcttagaagtaatttatttcaaatgtcctcaaacgggtcagctaatttaccgagagcatcgattctgcccccagctcatgcccccaggatctataccaacctagaaactgtgcagctggtcctctactgtgttgatgatcagaattcccttctcctttttctccccacatatttttatttccaccttgatactaaaactctcagaaaactagtagatgtgcagggatcaggggagtgatgtggtgtgaagggtttagggagaaattgttagtaacacatttcatttgagaaaataaatttcttttagggaagatgaaggcaagaggagctctagagtgagcaagaagggattggtgattttttttttatatcattctttggcacagagttctaggaaatcagttgtgtgataggagacccactcctgtatagcaaagctaccatggatgaaggccttctagacctgggattgtaggagttctaaccatcactaaacttctttagtgcggcagatttttcgctgactccactgccattcctgcttgattctagtgaggcttctgatataacaatgctagaaaactaaaaaccccacttaccagagccaggattttgtacgtggatgagattcttccaagcagatgtccacatacgagactaggagggtttgagcaatgggaggcagtggccaggctcagggacactggaggtctttgcaagcaacagacacgttggttctcctggggcagttctagaagagtttccagagtctggttcctagaaacttaggtacggagcagtacgtggtggcaaccatggtgtttccactagaagagctccatgtaagatggggcatttcccttgattgccattgtttctaagtgtgcagcaatcaaatcttatttcctgggtcctggtgaagttctgtaagaatcatcgtatcatctgataaatcattttcttctcagagtaaccagagtgcattctgttgtctgccactatgagccataaccagtgacctccttaacaaagatagggaagttaacacattcttacgtaggccatcatcaaggctagataaatgtttcttctaagagtaaatctaaaaggaaaacatcaatatgtgccattgggaataaaatattttttaaaaactgaaagaaaaacaaccccaacaactcagaaggggatggagagacttttgaagatgatttactgcacaaaccagaaataaattattttggaaactcaaaatgatttactagagataccagaagtaaattattttcgaaacagtgtgccatcactaatagaatacacaaagacagcaactccatgaaacaaaatcagaaaccaaaaccaaagaacaggctgcaaaggaaggggaaagaagatgagcattaaagacagaaagatggcaggttgtgtgctccacaaggagcacattttgcactaacaccacaagagtctggctcagtgaatggggattgatagtagtttaaatgtctgagagctttgaggagggattaaaacatgtgaaaaatggagacgagctcactccacaggtctgatgtaggcgatgctggcccaggaagttctgtgcatggtggcacccctgtgacacccatggaaggccatgtctgatctccagttccacagagatcctgaagagacagaaagggaagagcagctgctgcggaaaaggttgtggccagggaggaatttcagggagaatggactgctccagttcctgagttgactgctctccaagctgaggctgcagactgggctataggtgtaggtggcctctgggcccattcagctgatccctactgaagtctaaggggctcagtctcccactgaaggctgatctgcagctcccactgcccagccactgaggggtcttaactgtttttccacaggctcttacacagaaaacagaaaaaaggtgaatggaaaattaacatcagttttttaaaaagtaagacgagccaagacaaccagatgagaagataaacatgattggtgagataagaaaggattctaagaaaacaattgcaataagataaatatgttttagaggaggctgggagtatagtgtcaaatttgatgtagtgcaatatttggctctttaaaaaatataataaaccctaagcaaatataattaagaaaacagaaaaaatgaacaaataacaaaagagaaaggcaaaatgataagcttccgataaacataagcaggaaaaatgggcaaataagaaatcagaaataagaaatgtcaagggaaaaaagagttggaaggagaaaggtataataacagaaatggaggcaacatatcaactgattataatgtatgtactcaaactgtataaaagcaaaagatcattggagaaacatgaacattgaatgaatatttgatgacatcaagaaattattgccaacgttttaggtaggtagtgatattttcactatttttaggtccatatattttagagctacatgatgaaatatttaaagatgaaattatgatggtggaatttgttcaaaataatgggagagggggtggcagtgaatgacaaaatgaatggggatataagtagaatgaagttttcatgaactgactaatgttgaagctagaagatgggacaatagttaattgtactatcttctctaattttatataataaaaagtttttaaaattaaactgagctgagaacaaaagtgataggagattatgatattctaccttgcaaaatataatttaaaatcttaaaattaagcacacttttctgggcatgttaccaaaattgacataagagaaaaatttaaatgtgaatatattactagccacaaaagaaatttaaaatacaattaacatatgtcaaaagtttctttcacaaatttgaggaatcaggttgtatcaactcttctagaaaatagaaaaagatggaaagctacacaatcgatttcatgaagctaaattaatcttgatttctgtacctaacaaagataatgcaataaagaaaagaaaatcatgagctagtctcacttaggagtaatttttaaatcctaaataaagtagcggcaaaataaatagtatcctaaaggaattttctatcatgatcaaggaaagcatatcttatcttgggaatgcaaaagcattcaattttagaaaattcaacgttataatactttatgtcagcggtccccacatttattaggatttaaagggcattaaataacacctaaaacacattctcacattgttaaaaatccttagggaaaatgagaactcaaggatacttctttcacatcataattatgtaaacgtaaacaagtggccagcatatgaaacattaaaagtattcctgttaaaaccagaaacaaggcaggtgtgtctactatttcaccttgctcaagaagatcagagtcatgtaataagactggaagtagaactatgaaccataactaagagaaaggaggtgattaaaagttcattataaactaacaacatggctggataacctaaacacccaagggattcaactctaagcactttgaattgaaaaaaaaaacaaagtaaagggaccagattaaaaaataataataaacgtacaacagtccattgcttttccatacaccaacatgaagcaaacaaaaatatactctcattggtgaaaaagatttcattcttattcagaacatgaagaaaaaaaaactattgagatacaatacaaacataatcaacaaacagaacaaaatgaaatgctacacagccggtaaaaatctgtaacagtaagtgaaaatcactctggagaaaaaaataaaataaaataaaaaaacaaacaaagcccagtatccatgaatatattcactatgattctttttttatagactacaggttagatataatgttagaaaataaaaacaaaaataatggcaagtaaacctatgagattttaatagtaattatttttgtgagatcaatttttagatcaaccttattttctgtatgcattcatgctatattatctacaacaagcaagtattacttttgagatcagatcaggaaagaattttaatttgttgagttgacttgagataaaaaaattaaccaataaattcactggctacatatgattttcaagatttctgaatcaccctggggatgagagcttttctaaaacatggggttagcacacaggagccataggtctgaggcaaagttcaaatggatgagaatggaaacgttgctctggcttacccaagctggccagtctgtctagaactaatttaagaacataaagatgacatcattgcaggtgttctttcaaagtggagcacccatttataatgcttctggctgacaaaattggaaaggagacaaggtttaaaaagcctcagatattctttttgtcgatgctcaccatctttatcttcaaataaaactatttatatttcttctgtctgccccttgggctctggttcttggttaagaaatgtctcataaatttcagaagaggaggaaaacagaaggtgatggtacagaacattctattttcaagactataaatatttcaacttctcgaagagatcacctatcatgaaaacttcagatcttcctaagtaagtcttataaaaattaactataaagtttatgacagtttccacaatcaagtactgtatgccagattggcttaaagcatttagaaatgagcagcctgaatgttggcaaaaggtcacatactggaaaagagtaatgtccaattcaaaaagtgaaaagtaagagacgctgccaatccaaaaattgaatgcccaaactttactgaattctgttaataaaatcaacaagttgttccactgtacaggcagggttactactttatgctgataatccaataagtgtttattaagcacctgctatttacaaagcactgtgctggacgctgtagagagaattgataaaatatctcaaggaacttagaaggtaaccagggaaaaggacaagtacaaaaataaataatagaactcttaccaattaacgtgagcaaccaaataacctgattttaaacatgggcaaaagaacagacacttaacagaagaacatgtaggaatggtcaggaagcacatgacaggtcgctcagcaccattagtcatcagagaaacggaaattaaaactacatcaagatgccatttcacacccactagagtcgctcaaataaaaatgattgacaatgccaaatgttggccaagatgtagagaaaccggaactatcttatattactaggggagagtaatggtacaatcatgttaaaaaactgtttggcaattctcttaaagctaccctattgcccagcaattccatttctaggtatgaatacttaccccaaagaaatgaaaacctatgtctacagaaagcgtatgcaagaatgtttatagctgctttatttacaatagccttcttccccaaaatgacaaatgtccatcaacaggaggatgggtaaacaaactgtggtatagtcatacagtagaatactattgagcaattaaatagaacaagttactaataggtgcaacaacatgggcacatctcaaaaactccactttgagagacagaagtcacacacacaaagaatacatgttggaagaattcatttgtttgaaactctagaacaggcaaaactgttctatgaggttaaagctatggtgatagaagtcaaaaagtggctgcctccaagattgtgggggtggatcaacaattcactggaaagggagagaagaggaagttctggggtggtggatgtgttctgaatcttgattgggatgatggttacacaggtgtacaattgtccaaacttatcaaactaagcatgtaagatctgtgcattttgttgtacttaaattatacttcattttttaatactcagaaaaggtaaaaatagaaacagtagacatttgacagttgtgagtttgcattgcaaggactacaaaattcctcaaatttgttaatatcaccatagaacaggacttcacaataaaatgttcactttcgcatgaaagggaggaggtcagggtgagtatgggatgatgaagccacagtgacgccagatgccaggtgaaaacaggaacccacctctggggcccattcctgtagtgcctgagactcaaagttgggcctcataaaaattgtaactcatcgcacatcatgaatctctacactagcttacaaaggctcaaaagggaggattttaaatccaaaaatgtaactactgtacaagatagaatattagaaacatgagaaggaagttataatattttaaatgaggtctaaaatgacagctaaatctctcctcctgagtagtaaaaccacattaactcatatagtcaccactccttgtatgagtctggccccatccaaaaggggtggagtttaaattggttctatgatttgaaacaaacacatggaaagccctactgggatatttattagctacattaagatacaccccttaagaacctttaaaaaaactctaccatgttatctggtgtagttctgctcaggataccttgtgggaatataaatgacaaaaatttaaaattgccttagaaaagagttttcacattgctatgatccaaatgttggtgtcttcccaaaattcatatgttggaacttaatgcctgatatggtctggctgtgtccccacccaaatctcgtcttgaattatagttcccataattcccacatgttgtgggagggacctgttgggagataactgaatcatgagggcggtttcccccagactgttctcgtggtagtgaataagtctcacaagatatgatggttttataaggggaaaccccttttgcttgggtctcattctctcttgcctgctgccatgtaagacgtgactttcgccttccaccatgaatgtgaggcctccccagccacgtggaactgtgagtccattaaacctctttttccttataaattacccagtctcaggtatatctttatcagcaggtggaaatgaactaatgcaatgcccagtgtgatagtataaagaagtggggccttttggaggtgatttgctcttgaaggctctgccctcatgaatgggattagtgcccttataaaagaggcctgagagggcctccttgccctttttgccatgtgaggacacagcaacaaggcagagaacaagtccttgccagacacaaatcttccttgatcttggacttcccaacctccaggactgtgagcaataaatttctgttgtttataaattacctaatctaaggtgttatgctatagcagcccaaatggatgaagacacacatattaggcaataattatgtcagttaaatttggtgtgtttacaccaaacgtcttcaacattttccctgccctaatatttgcaaggagcacattaagtatctgcccattagcacagatgcctccataaggcagtggtgttaaaaggaggggaatggtgtaaagatgttccccggttggtggcaggggtagggggtatgatatatagtttccctcccccaccatgagaattactaattcaataaggaattaaattaatcaagtgccaatatgcttattatggcttttgtttttgcttttggttttttgctcaggttcgagggcatctttgatttttctcattcttcccaagaccttacatggtctggcccccgcattcctcctttgccccagcctcctactttcccccctcccttaagacccaagctgcactggcctccttgctatttcttgaacatgtcagatgctcctgccttaacacctttgtggtggctgttccacctgcctgaaccccctttcccagacaccccaacgactaactcctttacctcttgcaggctttctcataaaggtcattctcttagaagggccaaccttgaccattcctatttaaaactgcaatctgtcctctcacaggcaaggcctatgccctccttcctctctctgcactcctttctttccagtgcactcatcacctttgacatactgtgactttttttatcttattgtgtttattgccttattgtgttatatgtattatctattatattattatcttttattttttgtttattgcctgctcctcctgctacaacataagtgctccgtggcaggtgtctttgctcattttactaacttctcttaagcacctacgactcaacctgtcacatagcaggtgttcaacaaatgtttatcaagtgaataaatgtattcttttctatgcttctttaaataaatacagctgacccttgaacaatgtcgaggttaggggtgctgaccccacacacagtcaaaaatccacatatgacttttgactctttcaaacttaactactaatagcctacaagtagtcttaccaataacatgaacaatcaattgatatgtattttgtatgtcatctatattatacactgtattcttacaataaagtaagctagaggacagcaagtattattaaggaaatcataaggaagagaaaacatacttactattcagtaagtgggaatggatcatcataaaggtcttcatccttgtcatcttcatgttgagtgggctgaggaagaggaggaggaaaaggagttggtcttgctgtctcaagagtggcagaggtgaaaaaaatctgcctagaagtggacccacagagttcaaacctgtgttgttcaagggtccaccgtataaccatgatattagcattgtgaacattctctcttcgtctcctccttccacctacccaactctccactcaggggagatttataagcaagattttgaacactgaaaatcaaattaagtggtctggaaaagctgcaatggcaaacaggggaaaacgatttggaaagcagcccttaaccctacattttcctatcctgtgaaagctgtgaagaattgtgcctacacgaggccaatggccccagctctatcctctaatcaccttcttcttctatttcccaaatgtaacacttacccagccaacaagtaaggaaatagattagaaagcttttgagtgactcttttagtgaacctggaccccaatcaatcagaaaagttacgtgggattatgccattggcattagtttttcatgtatggtaaatacatgggttcgtctcatttgaaaggaataggcacattcgtgtcatcttaagaactggggttttatgatttatttaaggagccatctagtaataaggtatacaggggtaggacagaacctaatgtattacaggctccatagaggatagacttgggaggttgttcaggactgaagctggctctgggctccttgttggcttgttgccccattaacatcaggaattcttggatcttcactatggcactcccattggtatggatctcctactgtctattgatttctgcttctctctaggcattttcttttttctcttcttgtaccatctgactgactccatccatgtctccaggaggaagaatgtgaccatacttgctaattaccatggtccacgcttagggctcttaccccatggcctcttgtaggtcatcagtcaacccacaaagtggctgcctgtggtttaggtaggaccattaatcaaggggaacacagcaggcttgtgtttcaccataatcatagccaacccctctttgagactattccccacaggacctctgggatcgtgtcaagctcaatacattgatccaggtacccagaacgccagtcactgtgtctttgtccccactcagaacacattacccctgatcttttcttaccagcattctaaccctctagccttcatcgtggggaagcgttgacagcttaatacgaaacagtctcaccacaaaacaacctgctggtttctggaaactccccagctcccagactaaggcattcaggacaatccaaactcccatttccacaaattccagaatggattttcataagcatcaggaacactgaaagggcctgtaggctccacagggcacctacatttcctggggcttccctcagaaagaaggtggagggtaaatgcggtggccgcgtataaggaaaggaaaatgaaggttttcaagcctgcatgaagcctagaaagtgccactgtgtgtagccacacccataaatatttttgctttggtaaaattacaggcagagggccctgccaattcagaaaacaatctattggctgccattgccttgtgttccacactctgtgcggtacccactgcatagagaaagtcacctggaattaataggattccttgatatttgttttcaacaaatacttcctgaatgcctactatgcaccaaactccacagtcaggaacaggcctaatcctgttggtgtttttatttcagtctcagctctgtcaacctgcttgaagctgcaaggaatttggtgctcggggacaggcctccacaagtccaatgaagttggctgcgtttctgattcacttctctatccaagaataaaaataggggctgatctactcaaacgatcctgggagattaaaagattttgaagccaaaacaaaacccgagataagctgcctacgtgtgcgtgaggaggcaagtcagttccaggagccagcagtgtccgggaagggctccccgcagcctgacaggacttgtcccagcgacctcttccctcccgaggtcctgttacctgtgtgcgtgtcaggacaaagccctctgtgccactggcctccctctcacgtggtgctgtcctgcccttttttgctcggtaatttccagttaaagctcagctgtgtgtgtgtgtgtgtgtgtgtgtgtgtgtgtgtttatgtctactccactcatcacaaatacctttaataagcaaatttacctcctccatttgctgaattttatgtcttctctattccttgatgagaattgaatgggatcattccatggctttgacattggtttcttgtcctctcaagggctcacagagcacggcccagaaaggactaatggtgccggtgctgtagcaggacctcctctatttgggacagcctagcacgtgaaatcctctaggacccccagcctgcagtgggtggtcagtgtgtgcagtgaaagagcagggattccaatgttgagctgaggtgaatgtaaagggggaagacctctcagaagatgcaggtaggaacgggagcaagagtccccctaagcaatctttccttctttgccttccaccagatgtttgctaaacatctggaagcaaacacctggaccacctgcaacttggcagagggaaggagcctggccaagagaataaaaaaggaccagccacacttcactgtaagccatatccccaggcttctcatttcccctacctggggaggcaatgacaataatagacttcagaagttaattgacttaatgagtggaactccttcaatccattgaaggcctcagtagaacaacaacaacaaaaagtggagggagagaaaattctttctctctgcctaattgcttgagctgggttattgtgttctcctgccctcagactgcgacttacacctttggttctccagtttcatttctgtggacttggactagaactcataccatcagttctggttctcaggccttcagaatcaaactggaacggcaccagcagccttcctgggtctccagcttgcagacagcagactgtggaacttctcagcctccataatcacatgagtcaattccttataataaacctctctctctctcgacaggtagatagaaagatagatagatagatagatagacagatagatagatagatccctttacagcaggtggcagctaaggaggatcttcctagtggaggctgcatgaacataaagggcagccctagtgctggatcctggcccttgcaggtgagacggctctgatgagcagaggaacaccagggttctccgtctccaaattagataaaatgacctggacatacatggagtggttttaagaagcagagagtttaacaggcaagaaagaagggagaagaaagaaggaagaagctcccctgttacagacacagaggaatggggagctccaaagccaagagagaagaccccctgtgccacggaaaagtggctgcttatataaataggctggaggaggtgatgtctgatttgcatagggctcaggggattggttccaccaggcatgtcactcacgtagcctgcagaaaaaactggccctcccaccctagtcttttaatatgcaaatacagggcaccatgatgttctacacacatggggatatgtgggggtggccatgttgatgataagcacccctcccctcccacctcccgcacacccccaccccccgcacccccccaccccatctcccctacccccccccgagaaagcacacctatcctgtttgggtttaccgcttctcaatcaaccacacgggagcgtgggaagacaactcacaaacctctttgtgtttttttcaggttttgaagagcgagctataagctatatcgttttgctttggaaagacactggatttagaaccagctgcagtcctttaacaacctctctgaccctcattatccatgtggcctttggcaacctctgtgagcctcagttttcttgtcttcccccgctatggggatgtcagaggcaactccaggcggtaacacactggaaaatgctgcaagtccacagtactgggtggagagaaatttattgttattattgttgttctctttcaccccaaatggacagcttgatctttcccttagggaaacgctttcaaataaagtgattatgttttggagacctagcaaaatggatttggataacttccatcaggagggaggaagagagccggtggccttttgttatgagaccacaggtaaccaaatgtttgaaggaaggcgccacggaagccccctaccccgcacacagctctggttatccacaaagcccccacaaatgctcactggtggcctgtaccgctaagagcttctgtgctggccctccctagctgtctgcccttttttttttttttttttttttttgagacgaagtcttgctctgtcgcccaggctggagtgcagtggcgcgatctcggctccctgcaagctccacctcccgggttcacgccattctcctgcctcagcctcccgagtagctgggactacaggcgcccgctaccacgcccggctaatttttgtatttttagtagagacagggtttcaccatgttagccaggatggtctcaatctcctgacctcatgatccgcccgcctcggcctcccaaagtgctgggattacaggcgtgagccaccgcgccccaccgcgtctgccattctgctgagatatctatgtgcctcatcacacaaaaccccaccgtagccctgagcggtcctgggtgcataaatgccccgcttacttgggaagacgcatcttggtggggtaaggccttttccacttccccatggccaggaagacaaaggactaggcccagaagcccccgtgcctaacatggtgccgtgctgccactcatgaaggcatcagagcatgcatgccctcactgcacaggtggggacccagagcccccaagaggagaaacgatttgcccaggccaccctggcaatcagtgacctgagaccagttcctactcctagatcaaggtcccttggctactcagaccttctcaagaagaaattcttgttcaaatggacttttcccaagtgcagcctgctgtgtgctccagggcagccctcccacggtgattggttaaccccgggctcttcgtgtcaggtgatttaccccacagccagctaatctcacctttcctagactctccctttcttggcccacgtgctgcccgagtgacacactcagtgctgtaaatgaggatgtcacggtgtgttctcaggttttactggaagtgcagcccttaacaaacagtctagtaaacagccagcccaggcagtgcacacgtcagcagccctgctccagggctccaacgtcagcaaaggcggggcccaggcctggaagccaaagccctttccagcacccctcctgtcactgggccagccccgcctgcctgctgacttctggagctcccacactcaaaactgggatctgggagttgtgctcccaggcgaccacattcccttcaggggttgtgcagaaaaactgaaccagaatatggataaagatgcagaaaattgagactctaaactgaaattgcatgaatggcagccggaacgtttatttcgtgcctcagtaacacaggtctcctgtctacactggtcccatttaagatctccttgctaactcatgacaagtaagaatggtttgcttgtaaaaatcacagttcagcaacagtccataggaggactaaataatttattgaaagaaagaagtgaaaactcttcaatagaaatgtgaggatgggcactcaaattggcttctttaaaatatcagcgagaacgaaaatgatgacacttaagcaccgaagctactacaatgttttgataaggggtgaaaggagccttctcccttttatcaaaaagttccccatctgtcggccctgcagaggatcatgctgatgggaaacgggctactaagtaggacctgaaagtgaatgttgtcctgagttccaaatcaaaccaccaacaataaataacaagtaatcataacaattactattgatttagccttgttgagactcagaaaccaataccccaaaatagagggttttaacatgtcgaattgaggaagcctcaaggtctctctgaccttcccctatacacaccgtctttcccaaagaagctgaagtttctttatctgcctaagatccagaccttccaaggagagcaattattctttcttccccttcccacttatcttcttatctatggcagaaaagaagaccaaggtgtgacctgacccgagaagactccaagtatcatctgaattccaaagaaagctacttacaaggttatttctgttctcccatccaatcattctccctggcaatcatttattgcccctcaatcgaattcctcttcttcccattcccataacctgttttaccggaatccaaacccccatacgttctgtaaccccacaatggtacataagtttctgtaactcattgggaagttggggcttcattctgaaggcttctgtgcatacacgttaaataagttttatgccttttctcccattaatccatctgccttatgcctctcagcagaactttaggggtcaagagcctgtggcccctacagccttaacccactaaaatgtaagtactcagaaggcaaggactctgtcttgttcccaaaggggatctctagcccaagacaggccttggcacgtggcagctcagtgcatgttttgaacaggcgagtgcatgcatgatgttgttctgccagacactgtatttcacactatgtgtcattattaagtcttttatgccccatgaaacagatgtgcttcctgttttatagatgcagaaagggaggcttggggaggttaggaaacttgtccaagggttctcagctgtatagtgggagcgcttggctaggcagcatggccagtctccttccagagcttatgcaattaaccatggcatcaacctcccctccctacatgctaccatcttcagcctaggtctctggacaggtccatgggtccctaagtcctctctttgattgggaaggggatcccagcacccctggaattgcatgcacaatggcatgtgtctgggcttatggaggctgtgctggagagagggcccatggccttcagattttcagagaaacctgggatcaaaaaaagtttgagaatcactgtcctggtttcagcactgaaaatcccacatcctgggatgcctgctgttggtagcaggcagcatagagtccccagaggagaagattgagtttacattcctggcggttctcctatctcagcaggagggaaaaggctatgggaggtgggaacagggcacaaagctcagaaatggactggggaaaggctgaggaggaagtcctgggacagaatgaggtgattgtgacagcagcgcttcaacgttcggggcagaggttccaacgccagatccctgccgaaggtacctgccttcccgctttctctttagttgacgccactgtttctgggacaagttgaggaaggagcaccaggcagtagaggtttctgaggagtgaaagcgtggtcaggaagaccccctcacccaaaattctgtgctgatgtctgtttaggcgagtacctaggccatgcggggtgatgacatctgatattgtgctggcatcatccatagttcatgaccaattctccctccctcaaccactgggtggtccctggggtgggggtccccaggaacccccaagaacaggcccccttgcagaccagcagttctggacaggtcagactctgaggcccacagtgagtagcttgcaagaacatcctgaaagtgtcccaaagccaatagagtgtcccaaagccaacagagtcaggaacatgaactgtgtgtttgatgctcagaactgcattctgagcgagatatctggagtgtgctccggggccaagttctcccgtgacagatgaggggatggggctctgagatcacccaggtcgctgctacagctccagtctggcaactggaattgatcagcatttacagctagctccagcctgctaaatcaagaaagtgaggaagggctggcctgacacatttccttcacaggctcaacaatggctagaacctcccaggagagcctgggcttccttgagccatataccgtggcagccctatggccggcaccggcgtgagtcagtttttgagattacaagggggttgctggatgcttcctcctccacctgtcttttgtttcctaaattcagggtgcttttgtccctgaagccctttggaatgtgtggctccagcttccccagctgcttttcaccctaaggaccaggcagctgcagacttccagagacaacaacagggaattataggtgtgagtccttcgagaggcagttctcccaaagcaagccccacttcctaaaagcagccacacttgtcgctcaagcaaggcagggaggagcatggacaatggtgtcagagccactcccttttgaacatttgcctctacagaacctggccggggccatgggatgccctgtttggctacctgaggcctgaatctatcgggatctgtaagaagcgaccactgacattgagaatggcaccagccatctccagaaggagcaggtcatctgactcactggccacacacttcgcttgtggaagaaagcccgaggctacctggatgaagaaaggcatttgtgctaaattaggcagtttacagacctaacaccataaagcagccacagggctcccttctctcctctcaaaattcttaaggtgccaaagacgcccccacccaccagcctcttcaattccaggcagaacccagccctgtgcctggctgtcatcaagggcaccaggctggtgttttggcaacaaaccagctttcaaagtgacatcaaattgctgtgaatcacccgatctgattcaaatgagggcttaggtggatttagagatagctgattgcctcagatgaatgcacaattgcctcagaaagtaatttacctctgggagtttcaggtactaaacatttagagtttgcatttaaactctaaactggggcaggggcagctattcttttgctggcaggacccagtgaaggctgatcccaggtacctacgactcttctgtgattggtgcttccctacctccctgccccaccccatctaagcacaattcattttatttcaaagatgaaaaggaccctcgaagtcgtgacttggtctccccagtcacgcccctaatgagtggagccccgtgtctgtctgtgttcttcaccaggagttttttccatttcctgtgacttttgttgctgcgaagttcttcctggtcctgggtcacaattgatcatcttccagccccagtcaccctgcaggtccccatggtggaagtcaactccccttctcatgccatgttccttcacagatgtgaacagcactctctgtcttatcttttaaagacccaaaccctgagcccctcctactaccaaaccatggttctagagctcttcatgtcttatccatcctccctctggcttttcctattgggggcctccttctcagagggtagcagctacatacaccagggatggactcaataatgtcacctcccttgtttcagccagtagacctctattgatttaatctgaagtcacattggccttttggcagcctgtcccaatggtgactcataatgagattcatttagagtcaatcaaactcttataaaggacactgcctgaacatatccaacaaagcaggtagctgttctgttgaactttggagcaaaatgtccgacttttacatttgtccctgttaaatttctccattttaatctgccccatcattccttccctgtcattcctatagttttctgtcatctgggaacctgttgcaagtgccttctgtcgattgatccagatgattgtttacagcgcaattttgttatggaatcacctaactatgtcagcctacagcttgctttcctctgccttgttcagaaaggtcacagaaggctgcttcttcactgctttgctgaaacatcttaaagtgttgggccaggagaagtgttagagaccatctgcttcaagcccttcatttttcagatgaagaaactgaggccaggtgaggtaaagaggctgctaaaagatcatacagtgacctggtctgcagcagagccaaagatcaggactcagagattcccgtacccagggaccctctggttatttgcccagcaaggaaaccactggtacactccatcaagtctgctggaagactccaaaacagtggacaacagagcccctgcccttgggaagaaaggctaagtgggccctgaaaagtaagtaatcaactgatgactagagaaacagaatgtggtccagacatacaatgaaatacagtccagccatggaaaggaatgaagcgctgacgcatgctacaacgtgggtgaaccttgaaaaattatggtcagtgaaagaagccagtggcagaagaccacatattgtatgattccattcagaggatttgccacaataggaagatccctcgaaacagagaaagcaccttcgtgggtgccggggggctggggggtagggggaaatggggagtgactgctaatgggtacaagatttctttttggagtgacagaaatgttttggaattagaccatgctgatggttgcccaacaatgtaatgcactcaaaaccactgaactgtgcaccttaaaatggttaaaatggtgaattttatggcatgtgaattatgccttcatctttaacaagagcatcagcctgtcttcctgctctctggtggacagtggagaagaaaggaaaggaaggaggtcaagaacaaaccctttcctcctctcccagctgaagagctttgcagacggcggggagggcctggaggggccgctctctgggcagctgagggttgcttttccacctaaagggcctgtctgccatgtccttcctggcgcatcctgagtgtcccctgggctgtggtcctgggacctcccccactcttctgcccttctgccgcgatggaaactgggcctccctgggctgctgctctgccttggaaggaaatgggggacacttgcttggctcttcagcacccgccccgtgcttccgcgtttgtgtgaagggcaaaggttttagcgatctcctgccaggctcagatccgctcctctacacggcacgccttgctctggccaaggctccattcggaggaattcgggtgcggcacagcgtcagggtccagtgacagcagcagcaggagtcacctgggaggcccccagctggcctcagagcacgggcaggaagaggagccagaaactgaacagcggtggggagggggtttggataaagtatgcagaaatcaccgtggagaagagaagcaactggggctgtttgagaaagaaaaaaaaaaaaattaaatcctctgccagtttggaagcgcattgctttcatgtcggcctggctgattcccgcgtgggcgtgcggccctggctctggcggcctgccggggagcggggagcgtgggtggccttcccagaacaaaagttcaggctgcaggagtcacctgcgggagagccctgtcccctcccaccagggaccgctccgcccaccgcccagggcagtgagcaccgcagccaggtagccctgctgccagggagggagggcgaacatgcactgcgcacaacacacaacacatgcacacaacagacaaaagacaacacacacaacacatacaacacaaatacaacacacaacacatacaacacaaacacaacagacaacacaaacaacatacaacacatacacacaacacacacaacagaccacacacaatatacaacacacactacaaacaagcacaatatactagacacaatacacaacacatatacaacacacaatacacaacacacactacagacaacttacacacaccacataacatacaatatacaacacaacacacacacaacaaaccacgcacgccacaannnnnnnnnnacaacataccacacaacacacaatatacaacatacacaacaaaccacacacaacacacaccacaaaccacacacaacatacaacacacatcacaactacacaatatacaccacatacaacacacaatatacacaacacacaccacataccacacacaacatgcaacacataccacacacaacacatacaaatgcataccacataccacacacatacaaacacatgccacataccacacaaaccacacagcgcacaccacatacacaacacacaacacaaaccacacactgcacacaccacacaaacacattacacaaaccacacactacacaaaacacatcacacacagcacacacatcacacacaacacatgcaccacatatacacccacatacacaccacacacaccacacttcacacacatcccacacacccctctctctctctccttccctgtctctctctgtctctctgtctctccctccctgtctctctctcctcatgcgttctcacccatggagaatgtaagtgagaggagctatttacgtcatccataaagaagaagggaggaaggaccacagaagcccactctctatcagaagggccagagctcagggagcgcctttgtcagcaagatgggaaccagcttttacggagcactttgtgtcttcaaagaacttcaccaacattgactcattaagccacccacacctctgaggcagctggggtggcttggttctccctgtcagagaggagagaggtcaacgctcacctcagggcacagggcaaattcaagagagggcaagggccagtgtgtcccagatgacccggccgaggaacctgcttctgtgtcagggaaggggtcaagtgaggtcggaagtcaaggaccagctctctaggtgctgaagggttaaggaaggaggaagagagggtggccggtggctggtggcatcatgttaccttctgcctgtcatccagagagccaagctgaacaggcatcagggtgcctgtgaggaggggtgggcccagccttcctggggcagcagcccctccactctcttttcctgtgctgacagagaagggagaagaggtctcagagaggctcttggaccgagttcctttgttcctcccttctaggagtggtgcatttttacaatatcaacagtcctcactcccaggcaagatctctgtaatgcatcacacagatgaatccttctgtatctcaaagttcacacacagtatgaacttaacagccaacagggagcttgtttttatgctaatggaatggcaaagggaaagttcttcccaaatgaaagagctttgatgtcctgtatttctatatgtgtgtgtatgtgtgtacacatatatatatacacacaaatatatatatatatatatatatacacacacacacacacacacatatatttcctccaaaaaagaaatggctggtccggagctgaatctctttcctcctcaaacccctacttggaagcaggcattcctcccatcgtgaaagggctcacatacagcacaacttggtttctgaaagcttggcctttggagctagaaagatttgtttcagtcattgtctggatgtggagaagaacctgactcttagaggcagctttctctgaccccatcgctgcctgggatcccaacatctaggaagaggtttaaaagagaaactgtccaaccccaaaccaagggcaacacaaaccagcctggcttcttcactcacagcttgagcaagctgcttgtctcggtgattatttggacacatgctacgaagcacagagacatacgcttaccttttgttttcagggattaaagagaagattttaaaaatctgaagccaaaaagacacagagcaacagaagcagctgtacaaaacacaccctcagaagggaacaacttcagaagagagaacgagcaggaccctcaactttgtcctgagcccttcattggaaagcttatccatcttcatttttcctaaaactgggatttgtaactaaaaccatttcctaaatgctactatggacattgtagtaccaggcacaaactagggtagatgtgtcattttcaaggacagtttaactgggtgcattgtatttaggtcaagtgacttaaaatgctaggttggacaacttaggtgaactctttattggcacaatgtaatgcatattttgcacagccaagtcaatcttgcattcttgttagaaggtgtgaattggtattttcaatcagtggcagctgactatagtatcaagagcccaggagttcaaatctgcttctgtcatctacccaccaaaggacctcaggctgattaaacccttctagactcatgtccccacctctaaacaaacaatagtaatggcacctccctggtaggtttgctgtaaagattaaatgagatgttgccgcaaaacaatgagccacagtaggcattctctttgcccttggatttgtttttccacaatacaattctatgtaccttagaaaaatcaaatgatgatctggttacttattgacctaattgaagggatgcctataaggttattgaaatttatgtgtttttgtttgtttgttttattggccttttagttagaaataaggattgaggaaagaaaaaagggggaagagagggatggaaggagagagggaaaaggaagagaaaaaggaaggaagggagggagggaagggaggggagagaaaggaaggaagaaggaagaaaggaaggaagaaaaggaaggagggaaggaaggaagagaaggaagaagagaaggaaggagggaaggaaggaagagaaggaagaagagaaggaaggagggaaggagggaaggaaggaagagaaggaagaagagaaggaaggagggaaggaaggaaggaagggagggagggagggaaggaactgagcctattttaaccaaacacagagaacttagaatggagctaaccttatctcttccacatctgtatatgaaaatctgaaagaaaaaatgtcctcccgtgtttttttgctgctttatcagaggtgcttgcaagcctccgcctgggcaggctgtggcctgttgcacctgtttgtgaagaccttccttttcttgaaacaatacactgaataaatacccctggagttcgaaatctggcaaagcaactgagaaggggtgggggtggcggtgcaaaaactatgagaagaaaggcattacacacagtaagagcttgctcagtcaatatttgttgaatgaatgaattctagcttccgattatacctttgagctttaatgtctcttggctgcagaactgatcccccgtttcagctttctgtgttcatgctgccattgcatagactagaacggccatttcatgtcacctgttttacaagatgtagagcacattctcagaccacctgcatcacagtcatctgctaaaaaggcatattccaggcctttccaaatgccaaagaccagggattctgaagatccataatccagtatgtgactggccccaaactggcttctttaggtgaggggagagaggggaagcgtctggcttctacagagggagaagggagagttgacccggagccccagccagcctgcaccccgggggtggaggagagttggggggcaggggcactaacattattcttttttttttttgagacggagttttgctcttgttgcccaggctggagtgcaatggtgcgatctcagctcaccgcaacctctgcctcccaggttcaagcaattctcctgcctcagcctcctgagtagctgggattacaggcacgtgccactacacccagctaattttgtatttttagtagagacagggtttctccatgttggtcaggctggtctcgaactcctgacctcaggtcatccacccatctcggtctcccaaagtactgagattacaggtgtgagccactgcacccagcctaacatcattctctttcaacctgagggtctaagagacactgttaaagaagcttcaaataaaggcttgttatttaaacttataaaacagccccctaagagaccaaaatagcaatagcctaagcactatattagcaggagggaggagggaacaaatcttcgtttctcatgggagaaatctaccgataatgccaaaaatgggtatttttgaagcggtacacgtacattacttagcaacctggggtggattgccagcagaactaaaagcagaaatagttacaagatttaatttaaaatggtgatttctgtgaagctagcctggggtggggtggccagggcagggaactcttgttttccacaagaaaatatttctatacgggttgatttttttcccagccatgtctaaatcacaaaagaaagttagactttgtattcgaaaagcatttgggctggttgagtcagtctctggggttggggatggtggcccatgaaggtgactccaaaagctcccaaatgagtctctgagctgctgctgaacctgggaccaggtaactttgtgaagtgaatgaaccaatgaataaataatgaaagaagaatcagagaagtcaacactggctgtttgatatgcacacggatatgccagtcttgcccagggacccaaatccaacctaaattgaaaggcaaaactgaatatagcttcacctcaaggcgcctcttcctctcctgcaccccttttttttaacctattctaatttcacaattaggaaataatacaagtattgaaagttacatcatacataaaccatttccccaaatgtccttggctggtgccatcacccaggaactcccagggtggctggtgatcacagaagactccatttagaccactcagcagggtacgccaaggacagtcctctcaacctgcagaactttctggtttaaaacaaaaaacaaaacaaaaaaccactgcttttaagacttaaatcaaggtcttcaacagaaaagccagagacaaacaaaaacaaacaaactgattctgttttccaccaagctcaaagagcctttgccaaagtaaatcaaagcactccagcagccagcttattaggtttaatcatcaactgtgcttatcagatccttcatttgtaagtcccttgaagaaaaaaagtgcaaaatgattccttttgtgctttggagattgatatcaaagcaggccttgaggtcaactacagaggtgctttaagtggaaattataagcaggaaacaaaatgcactcattcaatttcttcaagttgagtggagacctcctggatgccacgtgtcagctttacctgctagaaacacacgctcacctcgctgtccaagaccctggaaaggggaaccccttgaattgattggattttgctccccttggccaattcttcactatggtttagagatttgtggtcttccagtggcattctactcaatcaaggtgaccagccatctgttgaactgtcttttccaacctgatatacccaagtgttgtggttccaatttcaatattccctcctagggagagcaaatgagaagatctatgggtgaataatacaagaatatggtaaatggttgacaatattacccacgaacctgcattaagtcaggttggttcgctggcaccctgaagccagccatagcatagtatttgattcaaaatccaaacacacagcagccaaagaggaaagcaaagggcaaattaagccaccactgaaggtgccgggacaggccagaggaagattccatcccacacccagctcaacttcttcccacctttcttctttgtctgtctgcatctgacatttcagttctcataatcttctctccaaacaaattctgccacgttctcccgggacaccctcttgctttctctctccctcttgatgcaacagtagttctcaaaccttcccatggaaaatcccaccagtttcttccttcctgggaccctctctcctttcctttccctataccaaaagatcaagaccaagctgggattacagaaagcgggaaccctgagagtggagtaggaaacagagactgaggttattggtgcacaaaatatgtggtccctggaacactattaatattgtattgatggcctacagtgtgttggccaccatattaaattgctgaatttaacaggggtctaaattgggcttctctaagtgcgttctgacgacactgttccagggagatgcttcttactaagagcatttgatggttaaatacatttggaaaatgtgtcatctcctattcatcccctggagactcctaatacacattacatttttggtaattcctgcaatagatatacttatttgtcattggttagcccagtatttccctgtttttttttcttttttttttttttgtttgtttgtttgttttttgaaacagggtcttactctagcagccaggctggagtgcagtggcgcaatctcagctcactgcaacctctgcttcttgggttcaagtgaacctcctgcctcagcctcccaagtaactgggactacaggcacacgccaccacacctggctaacttttgtattatttgtagtaacagggtctcactatgttgcccaggctcctaacttatttgatcaccaaacccacttgatcgtggaaaaagaagcagctaatgtcagcatcactcttggcccacgtagatcttcaagatggaagtcaccaaagtacaaatgttccatgtgtgtaggctctggagccctgggtgggtgttcacctgatttactggagtgtttgtggtagtgtagccatgggcgtgatgattcttgactaggaggttttgttccccaggaacaggggctgcaaacagatgagctagggagacaattcaggcatggatggttgagtaaacacagaacgtttaaaaagaaaaatcagcagaattacgttggtgctcctgtgtgggattcctttccaaactatagtcatggcttttaaaaatctcaaagatcctttggttttctttctcacacttccattccccagaacccctacccattccttagcattgttgtttcttaaatgcaatgatcttctcatggtccacagacctaggagaggaatggagacccctccagcccagagccagccccagacgtctgacaccagggctgctattttgaagggtgcttcgagatctgcagctccaggcattttgttattttgctatttgcttttggaacttcttaaaacaaacctcaaagacgagaaaactcctgtttgaaatgaattccttttagaatccaagaaatgactcatagaagctgttttggcatttatgttccctgttaagatgattaggctcataaattctatttttgaaatgcagtctttgtaccccgaatatttttccagaacagcaacaaaaaaaacctgaggtggaggagtaggggaggaatgatatccctatttacatgtttgctatgatttaaatacatgctgttgcctacttatttttgtattttatcatctatttttccccacactattaaagaggttgggcaattttcttcagtgaacttgcttaaaatgctctttttctaaagaagaaactgacttttaaaaatatcactagctcatatgaacaaactcatgtcttgttcatgtatgagctagtaagattaaaagttctgttttcactcaaatgtccaatgactgatgaatgaataacaaaaatgtggaatagtattcagccttaaaaaggaataaaattctgatacttgttccaagtaggaatatatcttgaggactctgggagcacactttcagaaacaccagtggcctggggcttcttcccccgcctggttttgatcttaccaacactgctgctcccgaaacagcctagttactcattcttcaaaactaatgcttggctggacccaagccctactttaatcacaaaactggtaccgttccaactgagttaggtggttttcttagggccatgcaacggactgtcttggcagggggcaggtgcagccttccttcttgggaaaaaagtctcaactgtagaaatgtgatggcccctgagatttgttttaagttattgtagttgttacctaagttttatgcaccaacgcctttgttcttgtgtaataaactgtcaactgcagcatgttcaaagtagctcaaccctctatttggtcataaaattaatcctaatctaaaaaccactctttcatttgtaattgcgtggcaagcccaagtttttaaggagcgttttgttgttcggtacttttgataacacctgtgaagcagtgctggtcatgagaaaagacttcgtgtgtgccttttcaagaacaatgaactgcactaaactctttttttttaacttgaagttcaggggtacatgtgcaggtttgttatataggtaaacttgtgctgcgaatgtttattgaacagattgtttcatcaaccacatattaagcctagtacccattagttattttttctgatcctctccttcctcccaccctctaccctcaagtaggccccagtgtgcgttgctcctctctatgtgtccaagtgttctcattatttaactcccagttataagtgagaacatgcagttatttggttttttgttcctgtattagtttgctaaggataatggcttcatctacgtgcctgcaaataatatgatctcattcttttttatggctgcatagtattccatggtgtatgtgtatcacattttttatccagtcaattaccgatgggcatttaggttgattccatatctttgctgttgtgaatagtgctgcaatgaacatatgtgtgcatatgtctttatgacagaacgatttatatttctttgggtatatacctggtattgggattgctgggttgaatggtagttctgtttttagctctttgaggaatcaccacgctgctttccacagtggctggcccaatttacactcccaccaacagtgtagaagcattcctttctctccataaactcaccagcatctgttattttttgactttttagtaatagccattctgactgatgtgagatggtatctcattgtggttttgatgcgcatttctctaataattagtgatgtgtagcttttttttcatatgcttgttggccatgtatatgtattcttttgaaaaggaattgcctaaactcaaatctcaaaagaagtattctactgtttgagtttcaaatgaaaaattaagcatcaagaataaagatcttcaagaatgtcatttttgagcgtctctggcatgactaaagaggtcatgaatgcccatctcatgtgtatcttcatgctttccctaaggcacaggccatgtttctgaattacatgtcaagagatatacacagtcgagggagtgaccagccattacattccaaaaataatccctgtgaagtaattataatctgtttaccttgatttgtccagaacaacttggtcatcaagcatctctctttatgatgcacccgcatggattttggtaaagtagagattgtggaggactgaatgtatcaaatatagacaaaagtgtcagataagctttacaaataagtttgccacattttttcaggtgtaggcaattctcgctgacttcaccggggctgatctggagtgatgttaacttaccccagtgagctttgtcctctcagcttcgggcttctgggccactcccagttgatgtcctggggcacaagagatgggggagatggataagaacacagttcccatcagtttccaggatgcctcattaggaagctctctttttggccagacctgggggagacaccatataacacaatgcaccccagaggaaaggcagtgaagtttagcagggctgagccatccccacttgagatacgaggctgggcaccattttacaccagtgatgacacctctaatggggtggaaaggtcacttaggcatggctatcttcaactccactattgaccttccccacctccactccttttctgccctccctctatagtctgggcagaaagaaggaagagatttcttccagaggtcgtaagataagccacagaagaacttctctccacaaagcccccatttgtggtcatggaaggcaggcgaaggttggtgcccttggatgagtgtctcttgctctggaatggagggcgggcgctggtgctagcatttccctcacctttggaaactcccttggctgtaaagagcaagatgaggccaggcgcagtggctcacacctgtaatcccagcacttggggaggccaaggtgggtggatcacgaggtcaggagatggagaccatcctggctaacatggtgaaaccccacctctactaaaaatacaaaaaaattagccgggcgtagtggcggcgcctgtagtcccagctactcgggaggctgaggcgggagaatggcgtgaacccgggaggcggagcttgcagtgagccgagactgtgccactgcactccagcctgggcgacagagcgagactccgtctcaaaaaaaaaaaaaaagagcaagatgagaggacacaggcaggggcggccccagtgaagctgccagctggagcctccatatcccctccccagccttcctgcagatccactgctgatggtgtcacccagccccttgcctgcagccgaggcccgctcccctctcagatggcgctccaccaatcccaagaaaggggcgatgagtcccaagaatgtctgccttttaatgggtgccagtccgggcccaaagggttgtgggagaaacaatgagctgaaaggggcccctctgatctttggactcacatccttcagggggactacaggctgcatcattcattccttcattgattcaataactgttcattgagtttctgctctgtgttctcaaggttgagaattggcagcaaacaagacaaacagactctgctttcatggttttgagtaccttgagacctacagccccaagccaagaaatccagctttcccatcacagcacagggtgctataaagaacatcaggtgggtcatgggctgcagagcaactgaatccccctgaacactccccccgttcagggaatgccaagctaaggcctcagtgaggaaaaggagccaggtaagtgaaaatacagggggaaagctttgtgtggggaaaacgtgcaaaggccctggggtaggtggtctggagtattcaaggagcagcgggtgttttgcagctgcaggggaaggaaggagggatgtgcagagatctcagtgcagcccttcacacagggcatcatgggggaggcatgaagatggtcccaactgtcttctgaggacactctctggtctcatctggagccccgagcgtgggcttctaaaccactcaagggaccagtggaaaaacttgtctgattcaaaacccagtgaagaagccaggggtgttggcatgtgcctgtagtgccagctacttaggaggctaagatgggaagatggctcaagcccaggagttcaaggccagcctgggcaaagtagagtccctgtctgtcacaaaagagtaaaattaaataaataaaatcaaccatgcactgctgtcctccttgcacaccactgaagaggctcctgccttctttggcggtccctccattcatatccagcatcataagatgtcaggcacacatctcagcctgctgtattcccagcagaggaggcagagccaggacaccagcccattcttcctaactaatctgccgtttaattagaccagttcttctcaacaacggggtgctgtttcacccaggggacactggcaacctctggaggcatttttggttggcacaaatggggcaggggtgcttctggcatctggcaggtaggaacaggggtgctgctaacatcctgcagcactggggacagccccccacaccagaaaaccatcccatccaaaatgctaacccatagatcagaaggaagatgagcctggggagaaaactagagaggattttgctccagaaaaaaatgacccacaataaagctggctcagctcctttcaaaattaaataccttccttctttgtcacacactggaaaacgagcgagtttctatttcaggctgtggggtgagttagcgtcggcttggccggctgtctggcagaggctccgattcatcaatgacagctaagtgtggtttgctgtgtgtcaggagaaggtccaggatgggctggggcagggagtgtggggggcagaccaccctcatctctggggctgctggagcttccggagcctggagcacacccagcctgcttctccttgtgggaagtgattaaatgtgaagcttaaagctgtaaggacttcctggcatcgcgggtttttacttctgaacttgttcccccctctctttacttgccctctgaagctcccaaattcagggccaggcacagtggctcatgcctataatcccagcactttgggaggccaaggcaggtggactgcttgaggccaggagttggagaccagcctggcaatatagcaagaccccatctctataaaataaattaattaagctctcaaatcgaaagcagaggtgtgtgtagaaatacccttaaatagatatgacagtgatgtcattgtacaacatagctgtcagggtggaagtgtgtctcccaaaattgatatgttgaagccttaacccatggtagctcagaatgtgactctgtttggacatggggtcttcagaggggtaactaaagtaaagtaacgctatttgggtgagtccctaatccagtctgactggtgtcctcataagaagaggagacagaaacatacacagagggatgagcttgtgaggacacagggagaggacggcatctatgagtcgaggagagagacctcaggagaaatctaccagtcaggagaaaccaaccctgccacactttggtcttggactccagcctccagaactgggagacaataaatttctgctgtttaagacagccagtctgtggttctttgttatggcagccttggcaaactaatcccacatgcttagagctacgaggggttcagatattctcctgtgcaacctgccccccagggtcaccatctcttttatggacacactctgagaagccatcagtcactgttggggatggagacctcactacgtctcaaagaaattgtttagcatggtatattagctttatcttgctgctgtaacaaattattttaatcttgggtgtttaaggaaatagcaatttatcctctcatggttctggaagccagaagtccaaaaccagtttccctgggctagcaccctccaagggctgtggtggagaatctgtttccttgcctttcccagcatctagagctacatcccttgcatttcttggctcctggtcccttccttcctccatcttcaaagcctgtagtgtagcatcttgcttcctcgatcagatggccctcttctgtctatgtaaaatctccttctgcccatctcttataagaacactagagagtgcatttagggccctcctggatgagccaggacaaactcccatcccagatccttaatttaatcacatttgcaaagtctctgccctataaagtgatgtattcacgggttccagagattagaatgtgggtatctttgcaggaaggggggattcttcagcctcacacacattggcctcctctccagggctgaaagtcacctctccagagcttccaacccatcactccttgttgtgaactctgcagcaaataacccatgtctaactcttcctacttgagatcttcctccagctttctgagaacagctcaggtgcaccttcaagggtgcccatttccagactggctgccccatgatttccctccttcctcatgggctatggcctcccaaggcctctgcagcctgtttcctctccaacagacttgagttggttaatagctctcgaaaaatgtggcaacaagaatgggtgagatgctgcaaggtgactccacagcccagagaacagcaggtgcctgccctttagtgccgtaggctatgggccatgggccacagagcttgcttcagcttcagtatctgcatttcacctgcaaggcactgaggccccatcactgaaaaaccacaagagcagaaatcttccaccttgtctaccacagagttccagttcctaagacaccggcctactcctaactggggctcaaaaaatacctgttgatgaaacaaatgtagcattaattctacttgccaagtctatgagtagatatttatctttaatcttccagaatttcaactttgccatgaatataacattttttgtctcgtataaacaatggtttgcggaaaaacaaaagaggcttttcgataaacagagagagcccagccagtgaagcttcaacacttttaagattctaagtcactagttcacggttaattcaagtaactactttgcagactggaagggtgaaaagaagtgacaaagacccctcttcctcccacttcagttagggggtaggggagaaagagagagaggggaacatttatgggacgatggaaagtccaaaaggaaccaaaaattttcccacgtcaaaaaaggcagagtccaaagaataagagaaaagtctgatgaggcctgaatatcatcagctattatagaggaacgagtttgatttaattgtagcagctacacttgtacacatttgaggtggagaaaaaactggacctcctgacacagtcatgttttcatgtgaacaggaaagattctactgcagcaggccatgggccagcccagacaactgtctgcagccaacacctgctgtgtgtacttagctcttcactggcagcctcaccttccctgcaccccacatccttaatgggggtgatgctctttccaaagggcagaaaactggttcttaaggggtcaacaaatcttagacatcataatggtttgtggccctttaaattttcattctctacagcacattcttactctttagtattgaatttcctttgttgtgaggaaattaaattaagtttaaatcgattagtttttctttctgggaggtgataaggatggaaaggttgtacaacagggccccaacccaccctggcaccagcagccctgtccactgaggagtctgaagctcactcacacttgggcctaagtgtttgactgggatgtctgatggatggaacctttcccaccagctgccagccatgctgcacagaggtgtgagcatgtagggaggaaccaatgcagtgggccaggggtaccatcttcattgctcctcgaagatggtggctcttttctctgttgctgtgacatatggcttctgctagtcacaagcctgtggccacatagctcccatgtctggcttcctcttgcagcatgctgctttgcccttgccaattcttggttagtcttttcctcatgcttcccaagagggtgacagggtgggttgatcagtcattatctagtttccaatatcctttgtgttagtttccttggagctgctgtagtaaattaccatagacttagtggctttaaaaacacaaaatttgggggccataaagaaggaaaaaacgtctactctcaccctcctaggttccccagctatagtcttgtaaatgagactaattgctaatggtttgaatgtctctcttccaaaactcatgttgaaacttaattgccaatgtgatgtaatgtaatgtatcaggaggtggggccttgaagaggtgattaatagattaatgtcattattgtgggagtgggttagttgttgcagaagtgggatcctgatgaaaagaatgagttcagtctaatttcctctgcttgtctcacatgctcacttctgccttctgccatgggcccaccttggccagatgcaagtgccaagcacttggacttcccggcctccagaactgtgagctaaatcaatctctcttttttgaaataaattatcttgtctgtggcattctgttatagcagcagaagatggactaaggcactgatgaaggacagattaacaagaggaaagcagacagaagtttactaatgtgtgcatcttaaccatgcatgaggagcactcagggatgagtaactcagaggggtggatagaacttgggtttacatagaattttaacaaaagaacagtcaattttgtagagaagtgacaagacaagagaaaagggctttgagtttcaagggggaggacacattgtgggaagacaaatatatggaaaacctaatggtagataagggctagttaataaggtttgttgattcccctggtgccgtcacaggctgataagggtctagagctgtctctgatgattaacacttgcccttcttggtagagaaaggagggggatacctttacaaatttatgttccgcttttagacaaacagggggaaggcagggagcttttcttcttctcaattgccttcagcttaaaataatcctgttaccaacatggcttatattggggaggcatattattctgctatgcttcagggcccactcagataattcagtataatttcccatcacaagataccttatttatcacatcagctgtgtagagtaacatattcacagggattcagacacaggcttttttgggggaagagagggggcattgttcaggctacctcatgccttaagacagtgttcttctgccaggacactttgctgactgacagcctgcctggaaggcaggctttatcagtggtggatagagcagttaaatcacagaatgcaactcaacttggcaacctgtggatcagggggcaccccaagaaactgggttgttgtagatgctctgctgggccatgcctgcaaggcctgccctgatattttcctaagactatttatatttttgaagatagctttggattaaacagttaaaagtcaaatggcaaggagtagggggtattggggataaagcctttgccttgagacagccgtcacccactctattaaaggaaacagacaagcaatgtccaagcagccagaaactcagaaaactccagatggagcaatatcccccagactgaccccactcctccttctgaagttgtgcaagatattgcctgggggaagtgaggtcacccacttcaccatcactttagccaaagtgcagcagtgtgcaatatacaaagtgtttgtggaggtttgagtttgttcattttctttttccaagagcagatttttccccctaaaagcatgctcttaaaggaacggcccccagctagtcacaaggaactcgaatactaacaaacacatcattaaacatatatgacttcctttcagtacattccgtccagatgcaggagacagttaccacattgattttcagaccaccctcattattgctcccacccatctctcattaaattgccttcaaacaacaacaaaaaaaagtcattaagatctaacttctgcttctcctttttcttaattccattctgtgaagttaaataggcaatagttggttcaaacaacctacgatatttcctcattttctctattttgtaggtcctgagaagctgccattagctctcaaggctttgagagtccagccagtttctccagagtgaagtccccctcctcagaggaacaaatgctttcagaggaacaaatgctttctgagaaactcgccactgggcagatcctgccacccacctgcctgccgctgcaaagcagagcctgcccaaaaagctgccatcattcccggcactgctacataaatgctgagtgtggtggcttgaattgtgtcccttgaaaagatacgttaccgtcccaatccctggtacctgggaatgtgactttatttggaaagagggtctttgtaaatataagaagatggggtcacgctggagtagggtgtgctttaaatccaaaggctgtgtcctcctaagagggaaatgtggacacaggcacagaggtaagatgatgtaaagacacgcaggaaggaggccatgggatgggaggcatttgctgcaagccccagaaccccaaggatccctggcaaccgccagaaaccaggaagaggcaagaagggttcttcctccgagcccccaagaaggaaccaactgattacagacttctggcctccaagactgtgagagaatacatttctgttttctttttggtttgtttttttcttttctttttgagcagggtctcaccctgtcacccaagctgaaatgcagtggtgtgatcacagctcaccacagcctggacctgccaggctcaagcaatcctcccatctctgtctcctgagaaactgggattacaggcatgcaccgccgccacgcccaactaatttttgtattttctgttgagatggggtttctctatgttggccaggctggtctcaaactcctgagctcaagcgatccacctgccttggcatccgaaagtgctgggattacaggcgtgagccactgtgctcagccccatttctgttgtttgaagccactgagtttgtggctgtttgttacagcagctccgggaaactcacacacagttccaccctaaaatgcccctttaggtcactttcactcaaagtcgctgcctatctctatttttatttatttttttatttatttttattattatttttttttctgagacagagtctcactgtgtcacccaggccagagtgcagaggcatgatctcagctcactgcaacctctgcctcctgggttcaagcgattctcctgcctcagcctctcaagtagctggaattacaggcacacgccaccatgcccagctaattttttggatttttttagtagacatgggtttcaccatgttggccaggctggtctcaaactcctgacctcaaatgatacgcccacctcaccctcccaaagtgctgggatttgagccaccatgcccggctttatctctattcttaatacatctcttctgctgcttctgtctgcttctgaggtttcaacctaagcccgatttgggctgcaaatccaagtaagaaccattaaggccctctggggatttggctagttccaaaaggggtccagggaaatgaggtgtgtcctccccaaccttccctccctccaagttttcttaaagtagggtggcccatgtcgaaggatgcaaaataaaagcaaaataatgccatacccattgcctacaaggggcagggcccagggaggaaggaaagaagatgctgttaggtctctagtcacgcctgactctctgctgtgagtgtcccatagaatgtctcattctcaccatcctgaggtcagggccaaggtccccatcctataggtgcagggtgtctgggctgggatccaagccaagtatccttgttccgaagatcacatgaagattcaccccaagacctggtgttacagcagccttcttctatatccacggtctgtgcagggccactcagttgaagttcagttcaacataattacagttgaagttcagttcaacataattacagcggcagttctcaaaccttcgggggcatcagaatcacctgaatggcttggtgcaacacccgttgttcctcgccccatagtttctgattccgtgggtctgggtagggcctgggattctgcattgctaacacgtttccaggcaatggtgagaggtcagtccaggctccacagtttgagacctatcccttcgtgtaaacatgggatggtatcaggtatgagccaactcctggtgtctacgccctcaaatgatggatggaaaagaccaggagatggaggggccctccttcctcagcccccctccacccacacacacacggctttcatgacctcccctttgctagctgcctctgccaggcggtggcctgagtgctgctgtcacccacaccctccatccttcctgtgcccagagtccatttctccacttccctctgttcacggttaattcacgtggagggaacgtccctgagcttgtgttcacatgagcagacacacccacaggggccgccacttcttttgccacctttccgtgtttaccttgtccttcccttttggatttgttttgctacacattgtgttatgagctggactgtgttcccctcaaaattcatctcttggcctagcacggtggctcaagcctataatcccagcactttgggaggccgaggcgggtgaatcacctggggttagaagttcaagaccagcctggccatcatagtgaaccccatctctactaaaaatacaaaaattagccgagtggtagtggcacatgcctataatcccagctattcgggaggctagggcaggagaatcacttgaacccgggcggcagagattgcggtgaaccgagatcgcgacactgcactccagtctgggtgacagagtgagactctgtctcaaaaaaataaaaacaaaaactcctgtcttgaagccctatcccctagtagctcagactgtgactgtattcggagatggggcctttaaagaggtgattaaagttaaatgtgatgtcccagggccagaagtctcttcagaaatgatgggcttaaggatttttttttttttttgagacagagtcttgcactctcacccaggccagagtgcagtggcgtgatctcagctcactgcagctctgcctcctgggttcaagcgattctcccgcctcagcctcctgagtagctgggattacaggtgcccacaatcatgcccagctaacttttatatttttagtagagatgggtttcaccatgttggccaggctagtcttgaactcctgacctcaggtgaaccacccctcggccttccaaagtactgggattataggcgtgagccacctcaccaggctgggtttagggattttttcagatgaagagattgtcctggtatgtcctaaatgcaatgacaagaggccttaaagaagaacacagaggaagatatgctacaggagcagaagggctgttaccaaggagcaagatgctacgtggttgctttaaagacggagggaggggccatgggccagggaatgctggcagccaccaggggccagaaaagacaagaccagattctcccctagaccctccagagtggcacagccctgccaatgccttgaccttaacccagcaacactaacttcggatttccgccctccagccccataacagaatgaagttgtgttgtttgaaggcatcaagcttgtggtcatttgctatgacagccacagcaaactcctacagacagaagagaaaagactcaaacccaggccgtctgtcttcagaacctgtacttattaataaagattttaccatttaaaacattcttaatgaggcaaagcttcattaagtgaaattcacagtacgatctgacaaatttaagccctgtgtagcgccacctgaatcaagatatagaacagatcatttccccaagaaaattccccactgcccttttctagtgggtccagtccctgtcccgagacagccacagtcctgattcccatcaccacccatcagtcctacctgttcttgaatatcatataaataaaacagtacattgctccttttctcctgttctcctacccgtggtttcaatattccacagattgctatcatttgcctgtgggctaactcttgggttccagtttttggctacgatgcatcaacctgctgtaaacactcttgggcaggtccttcggtgcacacgttttcatttctcttgggcaaacccttcctaggagtggaattgctgggtcatgggagtggtgtgtgtttcattttacatgaaactgccatgctggtcttcctaagtgcctaccatttgacggggcccccacagtgaggggtctcccgtagcttcatgtcctccatagcactcactgttgggcccctgcacccttaaccactgtacacaatgaggtctaagctttcacggagtttgctgcgaggttgaagtgaggcaacctccaaaaagcaaagctccaggcacgcacctgcttcatgcaccggaatattcctttctgttccttttactaaataaatggagttcattcctctgaaaaataagcagctttggaccatagagccaccaaatgacatttttgtaaatcatatttcttttgaaaccttgctgaaatatttgagccactacttacgttctcttactacccaattataatgcatggtctccaggacccattctccaaactctgcttagcacgcacggacctttgtttacatgaatctcaacagctgtgtatggcaacagtgctcctttccacggaaccaaaggtgagatgcaggccgctcctgaaagactggaaaaaaacggctccgaacactttctctctctctcctccctctgtctctctttgtctctgtctgtttctgtccctgtgtttgtctccgtctctctctctccaatgtcaggttcacagaaatagattaccaccctcttcctactggaagcacatgtaagtatgtgcacatccacaggcatctgcatactctcagcccagcgaggtcaccaacaccatgtgtcctgagccttagcaccaattcacacccacttacagctccctcttcctctagaggcaccacttgggctgaacctgtgtttggcctttttttttgaacactgtagttttatcctgggtaggtattcctaaaaacacactctttagttttagttttttcatatttttataaaaggttatcatggtgcatgccattttctgggattcatgttttcaactctgttagggctcgcagtgtccaagacccctccagtccttggcccacagaggaaaccgagcctcagagaagggcaagctcctccccacagcatagccataacccatcacataggttgacagcaaccaacatattagcatggaatgatcatttcttagaagctgtgggaggaacttccaccccccacatcgtttctctgtctcgtctcaacctcaggtatcaaggttgttttgttccatatttcacagatgaggaagcagggactcaaggccggtgaatttaactctggtcatatggctggcagagcaggccctcaacttgggcttgtctgacctgctgcaggagcccatgtcagcctgactctcccacctggacacgagttcccaaggcacgtgtggcatcagaggtcctgccagtcaaagcgtcggatctgtgcttccccccatcaggctggtgccacaggaggaaggaaagggcaaacacctcttcctgggagcaggggtcaggtcagcctgaggcggcaggaattttagcaaatccaagttttctcatgtctggacagcaccttgtagcacccactctgatggtgccaaggctcaggccgaagccagtcccatgagtgtggccagggctctgcacccatggcaatctcaggcacgaaatatgcatagctgtgtgtggtcaaggtggcctgccctgggatgtcagggctctgcacacatgcacacacacacagacacacacacacactcactcacttaacatgatgcatctctttgaatcctcacaacaacctttgctatgaattggtgattccaaaccaccccactgtacagatgagtgcactgaggctctgtgggctaaagtctcctatctgaacaatcagctcatgacggcagagctgacattcctctcccatgaagaaaccacaggcttctcacaccaaccccaagacaggaacatcaaggacacacctcaagtctacgcaggtcccaagactctcttccaatcgccatgcatttctgtctatttgtcagggagctggtctttactgtcttcatcaaaggtaaggaggtaagggtaagaggttactgttgcatgtaaatacatctggaagagccttccacccaccttattgcaaaatagagactgtgggagggaacaggcctctgcagtccccccctgttgcctttgctcatgtgagcagaggctcccctctctccacgtagacacaggtgttcatcagggctcagggatacttcaaggagcacaggcaggctcttgtatcctcttctgggtgcttggtgcagggcacagcctgtgcaactgtacatagcagccctgcgatgaaagaggagaccagccttgggtgctgtgggctggaagcagcttttgctctgtctggttttgccaaatctggtgccaggctcagagcagggagagagacacagtcagcctacttccagcactggcagcacatctgtccaaagagaaacatgtcttttcctagcacaaccagcagcaccagaagcacctctcctaatctgtcaaccgtctctctgtttttctcctctctctctctgcctcctcccttcttccccctccatctatctctgtgactttgtctctctccatccctctcccctcctctttctgtctctgtgactttgcctctctctctctatcactctctctgtgtcagtgtctccctctgggtctctgggtctctgtccctccccagtaggttctatttagatttgttgtgacaaattgatgtcatattcacatagatggcattttaaaaccacagaggtcttcagagccagagcttcattcacactgcaggccagggacactgttgccatggtaacatgactctccacttcctgccttacccgggctcccgcattcagcatcaccttcatctccctcagcaacaccacagatgattaaataaagcactttaattaactcggatttggtgtggggtcttcatcatcgctgctgggaacaagcgtttgtaaaccctcggggctacatgtgcccctctccgaggcagtctgtgaacccacactggccacttctcacaatttgggctataggaaatttatatccaagtagcacttgatgagattctaaggtaatagccacaagccacctccttcacaaggcgtgagcttccttcgtctgccgagacacattaacttcatgtaaattataatgtctttgagacgaaaatgtcttagtctgttcaggctgctatcacaaaataccataggtgacttatgaacaacagaaatgtattttctgcagttctagaggctggaagtctgagattaaggcgctggcggagtcagttctggtgagggaggcttcctctccgatggcctctgctcaccctaacttcacatgggaaggggtgaggggtctctctggggtctctttcatgggatcactaatcccggtcatgagggttctcccctcaccacctagtcatctccgaaaggctccacctcctaatatcatcaccctgggggtgtggatttcagcatatgaattttatggggacacagatattcagatcattgcaaaaatcaatgcattattaggcatggccagggagaatcgactgtggatcttttagataaaggggctctggtgctggggtgacagacctgccttcctggttttcaccctagaagcaggcaggaaggagaaggaatgaagggaagggggaaggaatgacgcaggcaggggcctctaaacctggatccaggaacttaaagggtaaaaattacatttttattttcgctagcctttaactgaaatgtatcatttcctttcaataggtacctaggcaacaagcacagtggcgtgttagcatccttgtgactttgacaccagtaaaaatcactggatcatctcattccatgttatgcctgtccaccacttatgcccatcactgcttcaaaattcccaggttattagtaccacctccgaggcttgttatagatctggttatggtatattaatagcacatgtgttgctacctcattcattgttttataatggtatcttaatcttaatgtaagtggtttcctttataacctgtgtgttttattttgtgcattcaaaaatctgattctgaaaattggcccacaggtttcacagactgccaaagaggtccgggggcataaatggctccagaaaaaaaaaatctagtattattaatatggtccattattattggtgttattgccattcataggtgttagacattggcccctcaataaaaaggatatgtatctatatcgatcaatcaatcagatagatataaaattctgaagatatttatagaagatatacaggtatctatatctacctgtagatatggataatttgtttgccaagaaaattgaggatttcaacatttatttatctctatttttttttccattgaagtcctcaaaagtgatgccaatatgacatgtggaagtgagaacttgggaagctggcctgggatttctagtgggaaaaagtatattttaaaaattaagggccgggtgcggtggctcatgcctgtaatcccagcactttgggaggctgggggacagatcacctgaggttgggagttcgagaccagcctggccaacatggagaaaccctgtctctactaaaaatacaaaattagctgggcacagtggtgcatgcctgtaatcccagctactcatgaggctgaggcaggaaaatcgcttgaacccgggaggcggaggttgcagtgagccgagatcacgccattgcactccagcctgggcaataagagttagattctgtctcaaaaataaaaacaaaaataaaaaataataataataagacccaaggcatgagaggataatacaaggctcattacagaccacagaagccattatgcctgttacttaaaatctaggcctgtttcaattcattctaccaaagtagacactgaagcaggaataccactctttaacataaacggacacacacaaaggcccagaaccagtgccaagagttttgcacccattaattcattccatcatttgtttattttatttgacaaatgtgcagatagtacttaccatgtgccaggcactattctaagtgcttcaaaagcattatcctatataaccctttaatatggtttgggtctgtgtccccacccaaagctcatctcgaattgtcatccccctaatccccacgtgttgagggtgggacctggtgggagttgattggatcatgggggtggctttccccagtgctgttctcatgataatgagtgagttctcacaagatctgatggttttataagtgtttgaccgttcctcctatgcgcacattctctctctttcctgctgccatgtaagacatgcctctttgccttctgccatgattgtaggtttcctgaggccttcccagccatgcaaaactgtgagtcaattaaacctttttcctttataaattacccagtctcaggtatttctttatagcagtgtgagaatggactaatacaaccttataacaataacaagaggtaggtactattattgttgcagattttcagatgaagagctaaagcacagagggtatagaaacttgtgagaagttcctacagcaagtaattggtggagacagcattcagcccctaagcccacccaccgcgggtattttgggaggcttgtcacactggccttcctgcttctggctccgcctagtcttcaacagctaaaggtaggattcaaacctaggtggtctgaatgagggcactgatatggtttagctctgtgtccccacccaaatctcatcttgtagctcccataattcccacatggtgggagataattgaatgatgggggcagtttcccccctactgttctcatggtggtgaataagtctcacaagatctgatggttctataaggggtttccacttttgcttctctctctctctttgcctgctgccctccatgtaagacatgactttctcctccttgcctttcaccatgattgtaaggcctccccagcctcatggaactgtgagtccattaaacctctttcttttgtaaattgcctagtcttcggtaagtctttatcagcagcatgaaaacggactaatacaggcgtgaaccctatcaccactaacttgtcagggcattgtccaggtggggaaacaggcatccaagagtacaaggagatcagtaagatcctgccctgggctcctcaggaaaccctctgtgtgtcttaccacccatccattaatgcgaggcaaagaggaaactcacactttcctaactttgcttatttttcatccttcaaaggacagctcttgtgcagatcccaaatcaacatcagatgaaagtatgggagcagcatctaatcagccatcttgactcgggtggctacttaacagccacctgccctgaccggtccttcatttgcaagcaaggctgctgctcagcattctcgcccactcagtggttagttctgagagccacatattgaccagtaagcccatctgcacagccccttggaattgggtctaagccatcacttcattctgatgatggaaaagcaggaatgtggagtctgagtgacttagccctggctcggcaagatctgaattcaactcaatcctcaatgcttccttctcccaagaaaagcctatggtactcctttctaaaaaatcattcctgctatgaactgacatacaataaaatgcatccatttttatttgcacaacccaacgagcttcgacaaaagtaaacatacatgaccatcacaacaatatagaattgtcccgttaccccaaaaagttttctacatgcctttgccatcattcccactcctggcccaaagcaacatgggagatttgacttcccttttctagaactttgtataaatagaatcagataaaacttcgtagacatggaagctagagacaacgctgtctgtgcattgactgtgtgctgtgctccagggaggttgggagaatatttacatcaatgccgtttgaaggcgcttctccaccctaactaggtgcacgtctcatgagctacctgtgagagtctcattgacacaggaatgacaagatagtgtgctctttgtcctccatgcactgagaacccagcacagccttccacacacagcttcccccacctacatacacctgtcccttagcagtctggttgctaggaaacatccactctatttcatctttacacataacatgccgtatttccctaagcccccagagtgggctcttgtcacttccgtttcatttctccctactcagcccacatctctcccagggctccccataaagcacattcccactagaggagcaaaagctggaggttcctcgtttccttttaggtgagcatgaatgaaacacgcgggggctgctgtgggagagaagaatctcacagaacatcttggtttagagcataggcaggcaggcactgagccctgggtcgcccactcttggatgagagagccttgtctttctgagcctggcttcccccattaaaaaacccaggctaaaagtggtccccatctccaagaactgtgaggggaccatcactcccatgccttgcatggagcatggctgcccagtcaggatttactgctgtcaacgcccacctcactatgcccacgtgtggcatcaatgacggtcaatgcaaaggacctgcccttgtcaagctcaactcagggttccctttataaaagcatcatgctggcctcatgtggtggctcaggcctctcatcccagtactctgggaggccgaggtgggaggattactagagcccaaaagtttgagaccagcctgggcaacataaagacaccctttctttacagagaaaaaaaaaaaaaaaagccaggtgtgctggtgcacacctgcggtcccagccacttgaaaggctgaggtgggaggatcacttgaacctggtagatggaggctgcagtgagctgtgattatgcgcttgcactccagcctgtgaaatacagcaagactctgtctctaataaaaattaaaaataaaaataaattaaattaaagcataatgctcaggaaaataacaccatatcttttgtttcagactttggtaggcagaacagtccccaaagatgtccacgtcctaatcccggaacccatgaatacatgaatacactttgttacacagcaaaaaagactctgccaaagtgatgaaggcaatttcttcatctcccttttgaaagggcgatcgtctgggattcaccagagagtccccaggagctcgggatggctcccagctctgacagcaaggaaggaaacagggtctcagccatatagccacagggaaccagaggctggcaatggcctggaatggtttagaagtagatttcccggagcctcctgatgaaagcccagctggtcaaccccaggacggtggtctgtgagagccacaggagagaaaccagctgagccgagtgggcctttgggcctacaggcctgtgtgacaggacagtggtgggagggagccatccgcctctgcccactgccctctgtgactccagcgcactcggggtcccacttccacaccctctgcaaaggccctcgcagcctgcccgtgtctccgcctcctccccaaggtctcccctcccgcctgctcctccaacagatgggcccctggctttgcactactcctcttttcccttcctcaggactttatttttattttattttatttatttttattccggtaccacctctcagtgagacccactgtcaccccatcagcgccctctccaccctcccctgctttacttctccttatcatccagcatgcatctattcaccaatatattatttatcgcctggcttttctactaggcaaatgattctcaactggcggtgacatcgctcctcacttctcccgggggacagtgggcagtgcccggggtcacttttgattgtcacaattggaggaggcccctgacatctggtgagtggaggccagggatgctgcttaacatccttcaatgcacaggaaggcccagccacaaagcacgatccagcccaaaacgccggcagtgcctcggcagaaatgtcacctcctacaccatcaactctgtgagagcggggatttgtttgtcacgactgcgtcctggtgcccagaccaaagcctgcacatcacggtgctccgtggatgggtttgaaggagcggacctggaccagagcgtgctgtaggccacagtcagtgccggcccacccagaactggccactcagcggttacccatctctatcgctttctttcccagagtcggaaacttggaaccactttcaacttttcctcttctgcttcccctctaggttccacaggggggcctcgctgctgggcaggggcctccgggctcctccatcctcctccgcccagctctgccctcccagcgaggaatctcctgtggaacatggtgggatctcattgtccctgctgcaggaagtggagcaaagaaaccgaggtagggggccaggttcagtggctcatgcctgtaatcccagcacttcgggaagccgaggtgggcggatcacctgaggttagaaattcaagaccagcctggccaacatggtgaaaccccatctctactaaaaatacaaaaattagccggggtggtggcacacgcctgtaatcccagctacctgggaggctgaggcaggagaatcacttgaacgtgggaggcggaggttgcagtgaaccaaaatcgcaccactgcactccagtctgggcgacagagtgagactctgtctcaaaagaaaaaaagaaagaaagaaaccgaggcagggccatttctctcccttcctgcagttccctccctttccttccctggcttacctggtgttcatcaacattccagaattctgcactgaaggaatcccatgcaagtctgtctcacagtgggagagcaaggccccttttttattcacgcgggctctgggatgaccagggtcagcatagcatgatttacacacgctgcttgaaccaaatcagtgaatggaacagccctggagtcattgtaaacaaacccagattcgctggacgcccgctgagctgaaaaccacaggaagaggagagaagacatacaaacctctttctcaaatgagactttctcccagaacctaatgttcgggaaaaatcttcctaattactcgttaattggcatattatcagcactttgtgccaaggattaagtgggtaattcccattatttctagagagcaaggtaatgcatccactcagccaggcagagtgcgcgcagctctggaactgtcaccactgaggcctgcgggcagccccgtccacgagcccagtcctcagccctgcggaaacgctggctgcgctgttgaagccaactcctgagacttgtatttttccgacaatgtgaaaaaacatttcatcattcagcctgattttcatttctcacttcttgggtatacattttttgaaaatggattttcctcttaaagaataatttattgtgtaagtcagtctaattctcctgctccggaactttgtgttttgaacctcttggtcattcaagtaagagcactggggtaattttagcattgctaattggctcgataaagaaatgtattttaaacaactatgattcagcacttaatcacagcatttgatgatattgtcattacaaaaacctctattctccattaaaaataattaaaccatcttaaagtttgaccatcctatgttggcctaaactttctatatttccatattactcaaatgtttatggacaagagaactgtggtacataaagagagagagagagggagagatggagaaggagggagaagagagcacgcaccctggaacttgggtttaagtcccagctcttccatctgccgactatgtctgcagaacagtcctcaccctctgagaccatttcttcttctctgtggggaggatgtgctgggaccacaaggtatcaggacagccctgtccccaggggtagggaagaatgacctcagaaggaaatgagaaggaaggggctctgggatcaggcaagggtctagcagggtgtaccaagcactcctgtagggcaggagccccagggacatatgtggaagcccatatatcttggggaatatgtggaagcgcatatacaagaaatgatccctctccttcctgggtgtctgcgccatgggacatgctctcggaggcagcttgccagaagggccaccagtctccagtcactattcaggcagccctctactttagcccccaaaacttttaaaaggtaaaagtctgaaagtccaagaatgaatttacctattttaccagttaggatcgggttgactgcaagtatcatagataccaaatcacagtggcttaaacaacacgggactgggtttggcttcattttccctgcaaagtgtggcagaaatgatccagctctttttcaccgagcctgcaggacctggcctcttcattcttccacttggccccctctaaggtgaggtccttgtctcatggtccaagatggcacccagccaccacatctgcgtctgcatctacagtggggtttgttgttgtcacctcattggccagaaccagccacatgtcttcacgtagtttcacgggaagcagggaaacatagtgatttcttctaggcagtcatgtgcccagccaaaaattccacgctatggaagaagatctgggggaaatatagcaaattctgcctctcatattagggtgtaaggaagtggtagttctgtttccagaaaacaaaaatgcctgtaatgatggtttcataagtgctggcaactcagtaggaaggggagagcagcaggagagcctggccaacggaggttggtgctggtgtcacctccctccatctctcctttctggtagccagtgcatctccccacacctctggagaggccaagacaggcagatgggcagccatgtcccctctacatggacgcattgggtgcctatagccaggctcgagcaaaagagtctgtcttctccattttccacaatgcaagccttgtggggcttcatctccagtccctcccctcaacaagctccctctgcaagccctttaccctgaagagcgtccacggcatttagggctgcacaggtctttgttgagggagctgtcttgggcactgtaggaggctgagcagcaccactgtcctctacctacaagatgccaggagcacccctcagtgtgacaaccaaaactgtctccagaaggtgccaaatgtcccctggggggtaaaattacacacacaccctccctcaatgagactcactgccacaaacccgggaccagctatgtctccatctccaggtgaagcaccgatttccataagacacaaagaaaggaggcagggctggaacctcctctatctgcagtagggatggtgtttgttgatgaaggggcacaggatctcaaaagaaaaggtgggaaactggggagagagagaggcagataacagagggagtgccactagagacatgctcatttggagacctcggactagagccatggctgccatgagatgcaggtggcacaggcgacacaccccttgcagcacttcccacgtttcattataatctcgtttcttcagtaccttctgcctctacaattatgagctcctcaagggcaggtctgggtctaggtcactgctgcatcccccgtgctaggcaagtacttgacccttcactggtgcttaatatttgatgaatcaatgaatgaatcaatgggtggttacttatttccccactaaagggactgtttcatatcaaaaatatgtggtttaaacaacaccaggcagaaggcactcaactatgtaacatttccatatgccaggcactaatccaagggctttgtatgaagtagcttatttcattctcaaagcaacccaaggaggtggagtactattgttacctccacctccaggaaggagagtgagacacaaaagttaagtaacttgctcaaggtcatatcgctagtaagtgatagagccaggatagaagcccatatcaatcatttactcccaggttacgtggatttttcgatatttactctgcaatactgcctttttgtcaaacaataatacaatgctgacatgtgttgcctgtcctgcctcctttccttcccaaactgctctccctcccttctacacaggtctctccagtggatgtcatggccatgtgatccacttcacccaccctagaagtgggcagtcactcaggcctatgaaattgtcccaccccagtcccacccccacacactgtgattggcccagagctggcccaatcagagttctttgggggaactgaaatggagcttaaggtaagaggtcacacttggtctggaggtcctactatgtagtcacagaaattactagggaccatcttgaagccatatgaagaaaatctgtgaaactgaagataagcagaggcagctacagctgagacagttgtctcgatgatgtcatctgagactctggatccagctggacccaaagcccctcctttccttctgccttcccttttttcttaagccagtctgagctcagtttttgtcacctgcatctgaataagtcctgacccaaacaaatatctagatagtattagttgactctatgaaggcctagtatctatggaccaaaatggtcttgattttatttaatttctattaattgagtgagatgctctttaatccagcatttgcatctcctcagcatgaacatgaagaacagaaacaagggcagaccttatttcaaaatggaatctcaagatatgtttggcttccgggggaaaaaaaatgccttattgactttagcatgaaggatgggcttcgtggcatcttcacccccaagcatcagtgctccgtgcttgttctgaacgacagaacagggcctcatccataccactgattcaacacagaatgtatggctcatttcctttgcttcagagaaagcatttaaatggtaagattggtgaaactctcaatgacttttgcattttcaacacctttgtaagatctaactcaaggctgatagcatacatgctcaagaagtagtattgattgattgaaagagcataggtgacaggtgtcagatacatgagatggttctttgattttgaaccacgtattattaaccatgagtatccactgaaaagcttctgattataagcaattcttagtttcacgttttaagctggagaataatcgttttgtatttattatgaaaatttgctgtatatgaaacaactcaagttacagcaaagaaaactcaaaaagtgcaaatgatcaaaagcttagagatgatggaagggaaaacttctcattgtaatctaaataataccagcaatttttaatcggctcatttgtgttccagaaatgcaggatgattcagaaaggtgaagtgcttaggatctcagaaacatttctttttatctttggctttctttttaaaacacttaatatggtttgcctgtgtccccacccaaatctcatcttgacttgtatttcccataatcccctcgtgggagggacccagtaggaggtaattgaatcatgggggtgcttacccccatgctgctgttctcataagatctgaaggttttataaggggctttttctcccttttctcggcacttctccttgctgctgccatgtgaagaagaacatgtttgcttccccttccaccatgattgtaagtttcctgagtcctctccagccctgcagaactgtgagtcaattaaacctctttcctttatacccagtcttaggtacgtctttattaccggtgtgagaacagactaatataacactcaaacacagtctcagagatatcatcccagtgttttagcctttctgtttgcattaaagagtggatattttatcataacatgcatattatttctgattcatagaacaggaatggagcaaccaaaacaaaagctttggttaatgaaaaacttcattggcaggagaaaaaacttcctaagtacagcaagtttccatacgtttaccataaaagtaacctagactccaccttggagcatgtaaatatacagactgttcattgtatatgttggcaatggtttaaaaaaaaagaagatttggacacatatcctattaaaatgtaattgccacttttatcatttactcagataacatatgaaaggactggtacacattcatcaaggaagtagtcattttattacagtcaagtgatgggatgatgtattgtgcaacgtgccctgccttcctggtttatgggacagttagagtacattgcccatgagtgttatctacacacagctgtaaagagctctttaaagaccatccagaaacatcaactagttaaatatctctatgtataagttcatgtgtgtatatttttcaatttcctaattatgtttgtttaagagcaaacccagttgagtatctttagacccaaaagttggatttcaactctgaatctaaagtgaaatgggaactttccccagggttgaaacttacatccagggcaactcctagagatcctatgaagccctaagaaccacagatgttagagtgagattcacccgattttttgatggagtgattgattcccctgtgctcaggactgggctgaaggcagcatctattcctaaattctgctagattctacaagatgttttgttttggtttttcttctttttaccatgaggaagtggagtcaggtgctgaccttcaggcctttgaacttgccttagctaccagcatttttcaaacttcaacactgtgaccatcacctggggaatctcatgacaatgcagactctgattcagcaggctgagggtgggaggaggcaaaggggaattcatcccatctgtccacagccttcccattggaacctaagtcccacatgcctagaaactcccttggccaaaatttctctgaagataaataaaatggcaagagccaggggtgcttgccattttcatctgccaaatgaggttatagaagactctgttttagaagggccacagcccagaggtctaggtgatgctgaaaaatgacacatggccgattcccaaagaaatgatagaatttcccatctagcaaagataccagaaagctgaactcacctttcatcatttttaaaaaaggataacgtctttgggaagcttttcttcccatgaaatcttactgccttcccagggtatcacatatttaaagtacagctgtgctcatcgaaggagagagaggacaggggaaggtaaaacctttctcctgccctgtaggggcctctccccagaattcctcaggacccacagaggaaagctgaaatgcttggatttaatacaatgccccattttttttaactgagctgaacataaaattaagcattttaaaaggaaagattcggtacattcacaacattgtgtgaccaccacctctatctagttgcaaaacattttcatcaaccccaataagcaccaaacccattaagcaatcaatctccagtccctcctccctttaccccatagcaccaccaatttgcttcctgtgggtacaggtttacctattctagtatttcatatcaatggaatcggacaatatgtgcctttttagatctgtcatctttcacttagcataatgttttcaaggtccatccacactgtagcacatatcaggaggtattcctttttatggctgaataataatctattgtagggagacattcgtctccccattgatggacattggggttgtttccaccaccttttggctactgcgaattactgtgtctctgagcattagtgtgtaagcacttgagtttctgtctacagttcttttgggtatatacctccatgctccaatgctatagatgaagaaccaggccacaaaagatctagtgacttggctaggcttactcagcaagctcatggctatgctggaccccaggtcaccgagtacctgctccagcttctactgaaccccaacattccatgagagcttggacttggccccacctctccacttatggcaatgccagttccctggctgggaaagccctctctggttttctttcccttccaaatcttcccactcagatctcagcactctatcctccttccccacaaggtgttccctgaccacccacagcccttccacttcttcctctaatttccagtcttatgataatctaattataagtccacatggcacacagtgtgtttcacgggtaatttggtgacttgtgttgacagtaagatatttgaggacaggagcttagcaaatctttatgacagattaaatacatgggcagaggcttgcagagccagatgggtgacttcatctggtctgctggcatccactttggctgacatgactagcaatgttacagtcactatacagttgacatgacgacattcaacaacaccaaaaggtctaaacagtgctttagatcccctggctggtgatgttcacagcagcgaagtcaccaggaatatgcaaagacacaacaagccttgtcaacaccaccttgccacagctggagccactaaatatgtggacagagtcctggcccaagagtatagcccaggagaggaatggacatccctctccccacctttgagtagaaaatgaccagtgagcctggcacgatggctcatgcttgtaatcccagaactttgggaggccatggtgggcggttaacctgaggtcaggagtttgagaccagcctggccaacatggtgaaaccctgtctctactaaaaaatacaaaaattagccaggcatggtggcaggtgcctgtaatcccagctactcaggcggctgaggcaggaaaattgcttgaacctgcaaggcggaggttgcagtcagccaacattgtgccattgcactccagctggggcaacagagcgagactccatctcaaaaaaaaagaaaacaagaaaatgaccagtgaaggcaacacaaaagggatcaatgacgtcatcaattacaggatcatgctcgattatctaaaactcagtttgccctgttgtaggacttgatctttcatagagattgttattacagaagtactttaaggactttagaaatatgccagtaaaacacacactttttttaaaattcattccagagatttccattccccaatgaggtcctcatcagagtcatcaaaggagcagcacatccaagaaagtccaaaagagatagacttttttttaatgatgcattagaaaacctgaccccaacccctgcctttctttgtctactttatcacatttgtaggtttagaaaagtttgtctttcagtctcaaaacttttggaaaaaataatgtcccactgtctttcatatcaaaaagaaacgacaagtgtgttgatcgtacagagccaatctcctcttcacataatgaataaagagaagtttccattcatttggccacaaaacaggtcattttcttcaaaatgtacacactaaaacaataaattaaacacttatgcttccaagggagaatagaaagataagagcaggagacatatgtgtgtcttgatggtgggtgccggtgtatcctgggagcttaaccctcactgcagatttaatattcacaaaagcccattgaggtgggtactatcatctctgtctaacggtgagaagatcaagaaactaaggcttggggagaataagtcatgaacaccaacttcccatgttaggaacggtgggttcagggtagaaatctcaaagttcagcttttcccaccacacttgaaaggaattagtagaaattaatggctttacagacctcacagccaccagttttttgctgtgggacctcccctgtgtctgtcctctccacatgtcttgtgtcaggccctggagaagcacagggtgccgctacctcttcacctgctgagcaaaccctgtcattgaagcaaccaggtgctcacacgtgttgtgaacacaagactccaataaggggacacctgtgtgtatccaattttctaccagcagcagcttatccactgggcatgaaagggaggaaaactactcagccagtcattaggtaaatactcactgcttatctcaatgcaaaaaaacaagcacccttctgcaggagtaaaaggaagtgtggaaaggtgaagagagcaaggggcaggaagcagacagttcagaatcaggagccttctctgcttgtgtggacaagctactcacactctcttagcctcgactttcctatctgtgagtgggactggcaatcaaaccacactactataaaaaggatacgtttgcccaaaatagccaacaggtggaagcaaacaggcgaatagataaacaaaatgtggtctctacatacaatgcaatattattcagccttaaaaaggaaagcgcttctgacacaggctacaccatggatagtccttgacggcatattgccgagtgaaatgagctagtcacaaaaagacaaatactgtatgatttcaacttacatgaggcacctggaggaatgaagtccatagagacagaaagtagaatggtgtttgccaggggctgtagggaatggggagttagggtttcacgcatagcaaatttcacttttgcaagacagaaacaggcctggagatggatagtggggatcgttgcacagcagtgtgaatgtacctagtatcatagaactctccgtaaaaatggttaagttggaacattttacattatgtgtactttaccacaatggaaattaataatgctaaaaaaataacatgtttgccatgattctgtcactgttgctgaggagaaaagaaacgccttgtactgtggacccaatcaactcaaattagaatctcttgggatggtgcccaagcacaggcatgttctagaggctctatcacacccacgccagagctgagcatcacccaacgagccgagtgctcaggtcacgttagtgactcatgtccctcagcctgacacttactcatgttgctgcaaaacagcaggatacattgggagcacccaggcatctgtgtgcattgaattaacttttatttagctcaactcaagaaacatttcttgcctaccaacagggctggcatcacaggcacctgcaggtagtgccacagcgggcgccctcagaaggccctgctcgtggtttaatgctcagtggctgccattttgaaattcttaacgatttttgaacaaggagtcctgcattttccttttgtactgtgggccctgcaaattgtgtatttgattctgcctacaaaaccagatcctgttctaggcctggagaagccagagataaaaggcaaagtggctatggagaggccataggctgcagaatgcccagggcaagctgaggccaaccccatcaggacctcctggtccaccactcaccccacccccttcgcctggagagccagacatggatttgcctgcagaggagggaggaggagaacccctgactgtgggtggatataaacaagctcatgacgagtgataagtaacatatgcaacaggaacaatgatgcaaaacatcggtgcacgttgggctttaggacagggcaaaactatacacaaagcaggcatctaagaagctaagttctgagttctcagctcaccccatgctcactcttcttgccagcattcatggaacatccaccatcgtgcaccggagtccccacagcttccagtctcaataagccatggccgcaaataagcaccaccaaccacttactgaaagcttccttcgtgccaggcactgtgctgagtgctttatataagcagccgcaagtgcttcccatcatggcttcctagctggctattaattgaactgttttacagatgaggaccaggaatgatcagagaaaccaaggaactttcccaagattacgtagccagttagcaggtgatcagatgtgaacttgggtcttttgctttgaaatctgtaactttgcccttcaatgtaaaatacccttaggttgaaccacatgcagttggtgtttggccgaatattgtcaatttcatcaggcagcgtgtgatgcagctgaaactgagaccatccataagccctgtgggaggccagtgaacccacagataaatccagatcactccctgttctgtaaatcagcgtgccgggcaaacagctctcttaagcagggaaatgaagggaataaagaacaaacaagtgggaagctctgtaagaacaatatcctgtgagcaagctgaatgaaagcacctgccttcctccctcagcccaagccagcttgcttaataaattagattgcttgtttgttagaagcacctttttaaaaggtgagtgtagacagctgctctccagataatgacactaagcagagctgttgctaccaagccacgctagagataaggctgctttcccagaaatacatttcggggcagggcaaattgaaagtgtgtacttctcaggtaataggtaataaacattccgttttggagctttctatattgagcttctgcacctggtcgctggaaggctatggtgtcagcaccaagcctgcagattgctttgtatatcagccacccctgtttttccccagtaaaataccactcccggcttggccgccagctccttcctctttcttggtggaaatctactgctttcttaaactggtgcatggaaaattacatggtcagcgccacactcggggctagaaaagcacacatcccacagtgatttcaaatgatccagcctttcatcattaaaaaataaattctgtgggcgaggagaaaagaatcgtgaggcccctaagcaggtgactcatttcagacagaaatgccaaagccatttctgaacagatgggttgacaggacacttagcaaatgctgcttttaattctttcttgcactcattcattcattcaacaaatattcccccaggcttatggagcatggggcaccactgtaggcactggggaagtagctgccaaatacaaaataaaacccaaaaaatcccttcttccctggagcttccactctacaggtggagacagagaggaaacagataaggaaactctaagagttatggggtaaagacagctgggggggcggtgcgggtggaggggttgccttggtggaaaggtgatcttagagcaaacagggagagaaggtgcagagggagctctgtggttacctggggggaaaatggtccttctacgcagagggagtgggaagggcctagggggaagtagggccagcttgatcctgggagccgtgtggctgtgggcatggagtaaatggggacgagcaggtgagaggtgaggcaggtacactgaggccaggtggccaccaggagcaccttgactttgcctctgagtgggatggcactcactgctctgtgcaaaggaaagtcatgactggacttgctttttgccagacacactttgaggccaagagggagcagggagaggaatgttgacatcattgaggtgtaggatgatggagtaagagatggacatggtggagtgggagcagaggccagggtctagctaggtgtcaatggggatgttactgacagaaagactctacgattcctccaggtggggcataccctcaacatcagcccatggatggatgttcccagaccccaggagtctcaccataaattctccctgggacagactgtgggtggcagtggtcgccatctgtccttggctgacaggtgcccagagctgtggcagtgtcattcccagcagccccaggattaggctgttatctctgtttaccaacaggaagagacactcggtggaggattcaagctgatacaggagccgtggattgccacctgcctcttctcctatgcctgtcatgagtacacacaccagtcctgtctgctggccaagcccccttgctcccaggtgggagaacaatgtgtagaagcacaaattataaactgattcttgtgttctctaaagacagtctgtttttcagatcatgattaggaatgagtaaacggtaagtctcaaagttttcaggggcttattatacagggcctatcagagtaaaaatagaaattacaacagcccaacatggaagaaagttttccttcctcactcccaaacttcaaacagagtccgagggttaggatgtgggcgtagctttttggggggccacaattcaacccattccagctaacttgattgagtattgatgccttttaaacaagcaatggagtgatcatcggagatgaagaagcaatttaagctcaaccctcaaatgcaaacccttccaaagcaaacatcctaggaggtgctacttgagttaacctcggagatgattaacctgggttttgcaccactgccctgagccattttccacagaacagaacagaacagaattctttattatgtttctcaagatgctacttttctacactgcagttatttcaggcatgactcatgttaaaatgagtgtgataagatttcttggtaaaacccctgggaggctttgagtagagagtttttaacagtagctaccccaagcaaggcagctggagtgggttgaatggttcctccccaaaagatcatccctgtcctaacccttggactctgactgtgaccttatttggaaaaagagagtttacagatgtaactaagtttgagatctcaaaatgaggtcaccctggattacacaatgggccctaaagtcaattacaggcatccttataagagacagcagagaagacacagacacagaggggaaggccatgtgaaggcagagaatggagtgacgcagccacaaaccaagcaatgcctggagccaccagaagctggaagaggcaaggaagggactcttcttcagagggagcagggccctgcccacaccttagcttcagacttctagcctccagaactgggagagaagaaatgtctgttgtttgaagccacccagctgtggcactttattacggcagcacgggaaatgcatacagcctccaaaagagaacgaagcccttctgagagcttgattccagacatgcaagaccctgagcccaccgcgcctgggtttctgcctacagaactgtgagataatccatggttgttttacgccactccaattgcaataagacagtgaggatgtcatgtgagtgaccagcaaggcatgtggcccaaccagacagccagggaaggcctttaacgagtaacttgaggctgagagtgaggtggtgagttgtggagaaagtcccagctcagggttcactgtggaccaacagctctttactgtggggtactaccttcctggagaatttcctggagagtataaggcctgacgtgggccttcaaatatctcaacaagaacaataaatccctccagaaaaccatattactccactttctttccaaaggaaattcaagtctgttgaaatgcttgctctaaaacagtttccagtgatattaaacaaattcgtggctctcagaataccttgggtgatgatcaataagagttgtatgtgctttacatgctgataatcacacctaacccacagcatttgtctgatgcctaagtgggctcagatttgcccaaggctctggtccaaggacctctgagggacacagcctcgtcactcagacaggagagcccaactcagtgacaaacaaaggccaagggattctgcacatgaagacaaaacagagtcttccttctcaactagagaatggcttatctaagaaaaaaatcaactggagagaaaaaaaaagtgaggatgtcagcatttaacaggaatcttgaaactttgacaggaagggtgacccttttcggtcaatctgaaatgtatgcagacaggtcacagatatattccaaatacatttttttaattgctaaatatgtttaaagaagatttttaaaataaaactcaatggaccagtttatacactgcaaattcattacatttttccaaccacgcagagctaggcttaaactcaactatactgaaggttaaactcaactattaccagtgttattctatcccaaagaatgagccaggtctaagctgatgtttcctcctgttgtgacaataagaactttccccattgtcttccacctttccccttctcgctccatttccacctctccatcgcgcagggaaggcagattagagttcactagaaacacaatacctgaaacataaaggcctcacacctacccgcctaggagtacagctcagatgatctttctaataaggagtggcaatggagcttgcaggccgaagaaactataacttgggtgtgattgacaagagcttaggctaacacatgcctgcttctataattatattgtttgtctagagagaaaaaacaaaaaaacaataaatcatccagcggtgcatgactggcttagttctctgtctctctctcactgggaaactcacgatgaagttcttccaggaagaggttgcaaccccacctgcccaccattctccatgacacctgtcactgaccaagatgcaagaaacacatgggcccctgcaaaatctctcgattcattttactgtttcttggtgaactgacttgtattatctcccttttcgctacccttattagtttcctacaaaccactacaagttagcagcttaaaaccacacatggcggggcgtggtggctcacgcctgtgatcccagcactttgggaggccaaggtaggcggatcacgaggtcaggagttggaggccagcctggccaacatggtgaaaccccgtctctattaaaaatacaaaaattagccgggcgtggtggcacgctcctgtggtcccagttactcaggaggctgaggcagaagaatcgcttgaacccaggaggcggaggttgcagtgagccaagattgcaccactgcactccagcctgggtgacagagcaagactccatctcaaaaaaaaaaaaacaaaaaaaacatgtactatcctacagctctggaggctgaaagctcaaaaatcagcctcactgggctaaaattatggtgttggcagcgctggttccttccggaggctttaacggtgaattgttcctttgcctttccagcttccagaggctgcccacgttccttggctcatggccccttcgtccatctttaaaggcagcagcaaaacccaagttttctccaccttctctccctccttccatcatcacatcaccttttctgacttggacgcacccaagtccccctcataaagtccctgtgattacactgggcccacccagatcacccaagaccatcttcccccctcaagatccttcacacaatcacgtctgcaaagtcccttctgctgtgtcaggtgacacatttgcagcttttgggaacattacttcctctcccactgcattttggcgagcacaaagctgagacatctcacaagagtgatccctgatctgggatttgagaagtatggtcactagaaatcagacagaaatctgcccacctgcactgtgggtgtcatcccactatttaaacaccagctaaaaagctctagggtgtctgcagatgccatcagcccaacttcaataatgaccatatctatgtgggcctgtgtgcttacccactgcaaatctaaacagctgtcaccaaaacatcccagatccatcccctctctctgccctactgctccccctggtccaagacaccacagtctctcctggggacacctacagcagctgcctgaacaaccttcccacttcctgctgggcatcctgtagcccctggcccatgcagcagcctgtggcctccccagaaggtatacccagtcccatcagttccagctcagaagcccccactggcttcccagaacatatggagttaaattcaaggctcaagtggcctcacagccctcatcctatggccctagctccctctccaaccccatctcactcctcacctgcttagttcatcctccctatgcccagagttttctcttcagttcttcatatgatactgggtcttcttcaggcctctggccccagcagttccatctgctgaatccacctccaggcctcacctttttggcctgggatggagtgtgttgactttgatcaccagccattctatcctcctccaaggcaacttatgactgccttgaggaagctggatgtcatgtccccccaggtttcacataccgaagtcctaacctcaagtaccttagaatgaaactgtatttggacatggggtcattgcagatgtaattagttgagatgaggtcatcagggtgggctttaattcaacatgctggtgtgcttataaaaaggggaaacctagacatggacacgcacacagggagaacaccctgtgaagacaaaggcaggaatcggagcaatgtgtctacaagccaagaagcaccaaagatggccagcaacccagcagaagctgggaaaaggcctggaagagattctccttcacagcctcaggaaaaccaacccagctgacactttggtcttgtacttccagcctccagaacgatgagacaaaaaatgtctgttttgttgttgttgttgttgttgttgttgatgatgatgatggagtctcactctgtcaccaggctgaagtgtagtggcacgatctcgactcactgcaacctcttgcctcccaggttcaagtgattctcctgccttagcctccgagtagctgggactacaggcatatgctaccacacgcaactaatttttttgtatttttagtagagtgggggtttcaccatattggccaggatggtctcaatctcttgacctcgtgatccacccgcctcggcctcccaaagtgctgggattacaggtgtgagccactgcgccaggacaaatgtctgttgtttaagccgcccagtctgttatggcagctctagggagctgatatgctgggaaagctaccatcatattttctgatcccttgcaaggactctagaagagtaggccccccaactcaactcaatgcccttgcgtagggtttggacggtggaggtgagtggaagcaggcggctgtgttgctgcttcttggctggtgctcttgggtggcccagctgtggcagcactgggggttcctacaacagtgtcaagaggctttgttttgtgagtgtcatgaggcagttcccatggctacaggcaggctgctcccagacccctggatccagcctgtaacacattcgtgtgtgtgtgtgtgtgtgtgtgtgtgtgtgtaaagatggggtctcactatgttgaccaggctggtctcaaactcctgggctcaagtgatcctcatatcctcccatctcggcctcccaaagtgctgggattacagacatgagacactgtgctggcctgtcacactttttttttgagacagagtctcgctctgtcgccaggttggagtgcagcggcatgatctcggctcactgcaacctctgcctcccgggttcaagcgattctcctacctcagcctcccgagtagcagggactacaggtgtgcaccaccacgcccagctaatttttgtatttttagtagagacagggtttcaccatgttggccaggatgatctcaatctcttgacctcgtgatttgcccgcctcagcctcccaaagtgctgggattacaggtgtgagccactgcgcccagccctgtcacacattcttgagccagtggctactaccccagctactggttcctgattttcctgacagcagcagtgagcgcagctccgggcagcccacggggtgtgatttggggagctgctgtggaggcccagccttctgagggattctgaaagtacctaataccctgcattaaatcctgttctgctcaacttaaccagaaggacagcctttcctgcaggtggacactggcagcctcacgtttagaaacagatgctgctttcctcacggacaccatccactcttacaccaccctcactctcactgagctgttttctattgcactcacaggtatttaaatgtgctgcgtttactcgtttgtttgtgtacttattgcctgaattgtgacctccatggaaacatcgaccttgtcactgggcctctcttccgacatcctcatgcctagaacagcgcttggtgcagtggccgctttggggtatttatggaagaagagagagagaaaaggaatttctaagtttggcttctccttgaagaagcttccaaaggcgtttctagaacacttaaaatatgtgaaaataagggctacctaggttatatgttaaatgaattatgctaaagaagactcagcagttgctaacttttctcatctgctcttaaatatcccattctgctgtttcaaattagaaactcagagttccaaaacagtgagatcgtttacttctttttctaaaaaaaaaaaaaaaaaaaaaaaaggcattggaataacggaagtactttaagaatctatggggcaagaatagaagctagtcatcgttgtctgtataaaccaaaaataaaattctaatgcccctcagctatctgaacggatcccccctctcggccaagggccttccagagttaacctgaaaatctagttcaggccaggacgggaagtgggggtcagacatgcctcatcaccccaacatcaacacagaccttcagtctgacaagaaacatgtacaatatcttgtttctgaagcctgctacctcgaggcttcctctgcatgatgaaaccttggtctccacaacctttcatcgtaactcagacattcctttctattgatagtaactctttcaaccaattgccaattggaaaatgtttacacgtgcttatgacctggaagtcaccctgcccccgccaccaacttcgagttgtcccaccctttcagacaggaccaacgtacatctcgcaaatattgattgatgtctcatgtctccctgcaatgtatggaagcaagctgtgccccaccatcttgggcacatgtcctcaggacctcctgaggctgtgtcacgggcgcattcttaaccttggcaaaataaaactttctaaatagattgagacatgtccccgatacttttgggttcacgtctgtcactgagatggtaactgtggtcatttgaataccccctcacattatcctcatctcgtcacagcagccctattcatctggcaaattgagggggatcacttggaatattatgtttttattaaaaatacgattttggttttctaagagatgctctgggctgctctaaaccagggactgcagggcccacctgtttctgcaaatgaggtttcattggcactcagccaggtccatttatttacacattgcctaggctcctttctagagctgagttgttgcgtcagggaccacatggccttcagagcctaaaatatttactctctggccccttaagaaaatgtttgtcagctcctactctaaacaaaacccctggccacatggcctctggcgctgcgttaaggtctttgctgtgccctttgcggacacggacacgctagggatgaactgactcagagccggccagtttcaggctccttcctggagcgataggaacctgtaattctcagcccatgtgaccagtactggccaatgaaatgcaagcggaactgacctgcgcctccaggctgaggcagtgaaacgctcctgagcctttccccagtctcactcttctcccctatggcaaccagcaaacttccagagagcggaggcaggggccctgcacggggtagagcgcagactccgccactgcctacctatgatgggcttgcagtgagcaagaaatcagctgttgcatattatggcactgagatttttagggttgtttgttacagcacgataagcctagctcattctgactaggatggtggtctttttgctgtcataattaatttccatttctcagggtttaaaagggtgcactgccccccccccccccccccgcagatctcaggtgggcatttttgaacttaactagataacaaaacacagctaagacaagtccttttctccagcaaagatggcaatgctctaataactctgagcatattaaagattctccaagactctagcctctgctgcaaaaacacatacaaatacctactactactgctgctgtgatgatgatgatgacagcaatagtgagaatattttaaatatgccaggcacggtggcaactgctttccaaatattatcatatttaatctgatcattgccctatgaggtaggaagtattctgattcccattttataaataaggaacccgaggcttagagagcatcagtgacttgttcaaggtcacccacagctgtcaagtgacagaacttcgataaaaatccagactcctttaatggagtatggagggaggtcagaaaacataggaagtaagggattgtgattgacaatgcgtccttgcaaagggacaggttaagagacacaagggcagctgtctgaggtgtgccattcaccagcttcaggagagaagtggcaggctacctccagctatccagccctatccagccaaggaagcttgggagacatgttagttcccgccttcatttccatcagcaacctcaaagccaccccttgatatgatgaaaataacattgtttgataaagagttgatattctcaatcttatgaaaatgtggattaaagcatcttactgatttatttaatctgaaacaaaacagctgttaaagtgaactaaatatggtctgagaaggactccgtacttcttttttttttttttttttttttttttttttgtagatggagacttgccctgttgcccagactggaatccagtggcacaatctcggctcactgcagcctccacctcccaggttccagtgattccactgcctcagcctcccgggtagctgggattacaggcacacaccaccacgcccagctaatttttgtatttgtagtagagatagggtttcacaagttggccaagctggtctcgaactcctgacctcaggtgatccagccaccttggcctcccaaagtgctaggattacaggcgtgagccactgcgcccagccagggctccatacttctatatttgagtccttgtggatgaactgcaacctagcttaataggtagacaagattgaaaacctaacttaggagtatgcgcccggaacaatagctgagtcttggccaagcccagcggccgtacttcaaccactcatatgctgctgagtctttaagctgtgttcaaataaggcaaacaccatactgcaaccaatccagccatcctgtacctcacttccaatttctgtacatcatttccctttctttgtctataaatcttcttccaccacgtggctgcatggtagtctctgctgtgactctgggggctgcccgatttgcgaatcgttcattgctcaattaaactcctttaaatttaattcagctgaaaattttcttttatcaaagctaagtaagaatttgccaacacgttgagtaaacttaatcatttcttccaaccagattgcatccccgagtctctccttttgggaaatttcagaacctacactgccgcccagctctctgccttcctacaactcagcccacccatgaccgcacctcattcacggcccaggtgtcagggacagggcaagggtaaggggggttcatccccctgataataagaaacccaatgctcttcctaccttcttggtagaaatcgcctctctgggacttcatgacagccgcctttcctatggcatacatcatttctcgtgttttagtggctttggtttgcttttgaatgtgtggtgggaagttccatgaaatttattaaataaccaggatatcctgttaccttatcaaggcctctatagaaaaccattgccctgggagaagggatgaaggcacctgagacatctcatatgaatcgtgatggcaatgtctcccctgccctgagacagcaagactgagaatcaggagaggtggttctcattatccctgaaagcattttagcttggatgtggccactttgaggactatagctgtaggcaccctaattcgtgttttgtgattatcaaaatatcttccgaatcctggacagatcatgacatccttaagcccactatcgtgaagccacatggaggtggtgtcaggtacagagcagagaacattcgagaggcactgggttgtctgggggacctctgggctccaggaaggtccacatctgcagggagacagtcccacggttgattctggaaatccaaactcttacgagagtcaaccgccagcttcacttcgctgtaattacccaggcgaagtgagtgaacaatctgagcctccccataaagctagccctctaattgttgtggtttaacagcctcagacctcaggctgggtggagaggagggcaggcctcgcagaagccagacacccgcaggcagccaggagcgaacacagtgcaaatacaactggctcagtcctacagctcctgtttggtttacagagaataccacctccaaggccattcgcaagcgcgacgtcactctagtgagaaaacaagtaaagctgagctattgacaaaaatatccccaaccatctaacaaaatagtaagcccagcattattttattccagtaaaaacccaatgacataggccagggccacagttactatacctttggttgatgattgtactgaggtttaggaaagtcccacggcctataggaggtcagacagccacagtggcaaccctgggcagccctgggccaggctctggaccaatacacaggccacacacctttttcaaaaccaaaaaggaagcacactagcaacttatcctccattctaaactcctgtcacttcctgggagaccaggtaaggctctcctggatgtcttcacagagcgggcttcatacgggatcagccttgacctccattcatgcagacagggatggcaagacaaagcctgaacacagcattcaacaaacagaccctgtgtccaggcttggaatttcccacttagggctggtgatggacgaggactctgagaagttcgttctgtttgaacaaaagaggccatgtcaatttcagaaccatgtatctcttaaataatgcatagtaatgtcctccatgcctctctcttggaggatcatccagagggtgatagcatcggagctttgatcttggatttttgtgtcatctattctgccaatttctgattcatttgtctcaacaattttgccaccgtcttttcccggatcaggtaaagcaaaatccagatcagcccaggcctgtctgcaaacagaaatgaagaaactgtgctaaatctcaaagattctgtcctgcccaaggagtgtccttacttataaatggagcgaagcctcctgcacctgctacatgggctcgtgtgcgcaccgaacccaaagctgctttctgggctcaccatgcagtctctccacctgaggcccccacccagccccaccctgtgatgcccacactgtgggtccacctcgaagtgctgacattcatcaccctttgaggacattctgtgtgtcagggtctgggcttacacctttgcaagggcatgtttgttttgactctaactttcttctaatagaaactgaactcttatgtctaatggaagtgatagcggtgtcaagcacccccttcacttttttgtggatgaccaaaacctcatgcatagggacccagcccactgccttatgcagggtggtgggcatgcagaagtgtttgtgggctggatttgaaaagctcccacttcaaagatgaggggtctatttaatcctgtgttgtaatgtcagtgcagaaggttgaatcagagagaatctgagaggagaaatcgcaagcatcatggctgattgctttcctttgtgtctggtgatgtcgctgtgcctgaatccacgtcactaacaatggccaactggcttatgccacctacccccgtggtcaggggtggcaaggtctgacatcagaaaggagggcaagaggtttgggaaggcaaaaccaacatcccctccaagaagagagaaccggccttcctgcaaggcctacccttgatggccctacccaaggcccacctgccctctcttcccacggagccctctaatctccccacagcacccatctatacccccttatgggcccagccaccatcttcctaatattgcctttattgatgggcagttctcatcacggctgctaagagagtgagcagcttacatcagcatagcctgtcggtaagcgctaagtgattgaaggaaggaaggaaggaagaaggaaggatgatgtgttctcacatctgtctgctaaaacaataagaagtcattgcttttgtcatgctgtgaccttggtcaagcccccttttctgcccttaactccaggaagctggactccagcaaaatcctgcccttacacaaaggcaagcccagtaggcccttgccacattgttggtggtattgtccttgttaacctgagtgttggggctgctgggagaggaacccatagagagatcagtggcttagaagggtccagacccagccagtctccaacagggtgtgaggacagagaagaggaggttgtcttgctgggaatggtgagcacagcctccccagagaggtgtgaggcaggaacaggtgtgtttccacgcacctgcactcatgtccctccgcagggccccagcctgcattttatgccccagccttgtcttcagggcttcccaccccttttactttgtccatcagaacccttagccaggtaatgatggttatttgaaactccccatctgatcactccaacctctctgtcacatctgagtcagattctgatgcttgctctgtctcttctaactccttttttttttctcttagtaacccttgtaattttttattcaaaaccagatatgttgcactgggaaaatggaacccaatactgcttcccacagaggcttctgctcctgtaagttgtgatattctgcatttgcctgtctgcctttccaatttcggggtcagtggtttgccctgtgacctcaactccctgacagatctaagaattgctgctttggggtttgtcaggctcttttcttactgtgtggataggagtgatgacgtccaagctcttcacatgccagaccagaaactgcaaatgtctctattctttccattcccagaatccgctaccttctgatatctgtctatggcattgcctccaaggctctgatgaccgtgaactccacctgggggccctctcccttccctactctccgtttctatgtttgcaacctctgttaggtctagcgaaaggctctttcctctaacagaggtttccctgacaccctgactgaatctttggatgcccccgctccatccccatcttggcacattggatacacaccagtcccgtcattgagtactgtctctcttatgagacggaaggcaccttgagcacagagcattggcctggtcatcttcccacccctaagagtggatgcttcacaagtattagcaagataaatatctatgattttaaattcccatcgtaccgccaacccatcttgtatgcatttctaaaaatgtattatcttgacattagaataccttttagggaagcacctgttgctgttttccaaaatatctcaatacagctgcttggggtggaaattaagaatatgaggatatggatcagtgtaaaagaaatcactgaattgtggcattaggaattatcttaagaatttgaggccgggcgcggtggctcacgcctgtagtcccagcactttgggaggccgaggcgggtggatcatgaggtcaggagatcgagaccatcctggctaacacggtgaaaccccgtctctactaaaaatacaaaaaattagccgggcgcggtggcgggcgcctgtagtcccagctactggggaggctgaggcaggagaatggcgtgaacccgggaagcggagcttgcagtgagccgagattgcgccactgcagtccgcagtccggcctgggcgacagagcgagactccgtctcaaaaaaaaaaaaaaaaaaaaaaaaaagaatttgagaaaggggcccggcacagtggctcatgcctgtaaacccagcatgttgaaaggcctaggtgggaggatcacttgagcccagaagttcaagatcagcgtgggcaacatgacaaaaccccatttatacaaaaaatacaaaaattagctgggctcggtggtatgcacctgtggtcccagctacttgggaggatgaggtgggaggatcacgtgagccccaggagttcagggctgcagtgagccatgatcacaccactgcactccaacctgggcaacagagtgagaccccatctcaaaaaatgaaaccaaacaaacaaacaaaaacagaatttgaaaaaaggaaaagagcaaagtagagaggcaggagagacaagggggcagagagctgaaaaccgtgaagagagataggaggctggaacctagcaaatggcgcatgaaggatgcttttaagcacagaaatatgtttcccaaagttgttggtgttgctgcagcataaatgctccagctccccaagccattggccaaatctgcacacacacacaatgctttgtgtgaatgtatttataatggagggacctggaactccatgtctcagtagacacagaaagaaatggggattgtgcatgtgtgcgggtgatgacatggtccctgaacagaatcaactcagccaaagcaggaattcagaggaattggacttcccatgaccagcagagtgggtttgatgcagcctagaacttaagaggccgagttaccacagctgacatctgcaaacagatgcacgaaagcacaaatgaatgaactcatgtaacattcagagaggacccgatgtgtgggctccatttgtgatataagagtcaacactggccatgggatagagtgtcaaagaaataccaatcgaggcagaagtcgtatggagaaaggaggccctggcaggtctgtctgttccgttgtattttgctaaggagactcaacaatgacttaatctacctcaaatggggagaactcgtagggatttgcagccacaatcagtcagccatgagctaggcagccatgcagatggaaaacaaagacaatctgaccactggattcctggccagcctcctgtgtgggtcttccgggaaccccgggtgactggtcctctctggaggacagagactgggctcaggaatggccaggagtgggaccacctgcctgggtcatcagcccactctcacctgggtgcaagcctggactggccctgctgcccaaagttgattaacctgggattaaacagctaaagagtcaatcttcctctctctctctctttctctctctctctctttttctcatttctattatttctttcctagagcgaaagttctgagaagcctgcaccctcatatcccatctgtaaatcttctagctagacgtcccttcaataatcgcattattcaatgcgaagaagaaacccaagatgttcccccaatctgtaaatcttctagctagacgtcccttcaataatcgcattattcaatgcgaagaagaaacccaaggtgttcccccaaatatataatacaacattaatgtagctgctgggagacatcaccagagattgcatggaaactctacaaaagcaaagcaaatccaaacaaaaaaccctctgcacaaggccaaggagctgaagtaagttaaaatgaaacatcagtaatattgtttgggaaaacaaagaatcatataacacatggcttctaaaagaaatttattgaatgctttcaaacagcttgaacaacagagcttggcagattaacagccgtaagtgtacctgcaggtgtatatcaagttcagacatctgatgccaggtcccaggccctggcaaggccagaaggcccaatattagacataatcattctcgctgaatgcctttttcaaagcccatgtaattcattgctggggttgtatttcatgtttaggttgtctggctttctttgttcttaagaaaacaaccaaccaataccaggaggccaaacgttgtttagaatcatgaaaccatagaatgttaccactgggaggcatcttggaaattcagactccaattcttctgtttttcagaaaagctaactggggctcagggaaagaaagcaagtggtctcttgggccagaggaaggaggagtccaaaagagggaagggacagcccttggtaaagaaccagattccagagggcacacaaaatactgcttcctggtttcacaccacctagacttaatgataacaatgacacccactgtgtgatttttatttccagtttataaagagctctcaattggaatttcttttgactttcacaatctgtctttaaaggcatggatgtgacctgcgtatttcagagtaggaaaccaagatgtagagagattggaccaagattccaaggactggggcttagaagtaagttagccacatccttttcagttttgagagctgaatggtcactagtatgaatgatgactgtcccagggaaaccagagggccaggtcaccccacccgtgccccaagcccatgccagtcccattcagccatgtggctcccaatcccatcctctattgcattaggcctcatatttttcgaagcacttttatggttctcttgtgccaagtaacccagtgagttgggcaggatgggcatgctgtgccatttacacaagaagaaatggagtgttcaaaagaggccatgtaaaccacgagaaccgtgcaaagacaagtttccttaattcaaatgcacatccagggacctttagtcctgggtacatcgagggttcctcaggcctgctgtagatccagacgtcttagcaaatccagggttccttactcctgctctagaattctctttcccacatacatttactccacccagggaagaagagaggaaggaagtatttaatagattgtaacatatgagatcccccaaaaaagtgtttttaagttaaagaaataaatgatggggggagggaagagggacctaccttcagttcagcctccaggcaaatttccaaaaggctggcatgttggagtcagctccggaacagcagccccatcccactgagtcttgggggagataagaagggtctcaagtcccaacagtcacagagcactcagctagtggtctcctaaaaagaataaagcctcagcttggttaggttggctctctgggccaaatgacaacctgaactgggggccccaaatctggcagcccatggaaatcacttggaagcagggttattccagatctgcggaatcagagtctgctttgaaccagctctccaggcaattccaatgagcaggcagatgggaagcagggatttgaacaagacttcattactattacaattatgtaaagtaatttctaaaatctccctcttctttcacatgagataatgaaagaaacccgtttgatacatttttttgcataaactatatgattgcttttttttacaatgtagttttagggaatttagagtcaggcatgggtttgggaagcaggacttgggttgagactctggccttgaccctaatgagcagtgagacctcgggcaagacatgtgaccttcccaaacctcggttttcttaactgtgaaatggtggtgatgattgaatgagcagtgcagggctcatgtgagagtcaaattaaatagtttttataaactgccttgtgcactgggagcatttggaaaatggaagcttttaggaacattgctgtgctgtctctatccttggtaatgtgggcaattcacaatgtgaagggtaatttttgcttctctcactgtatcaccgtgtcagcagcccagtttaagccagcacagtagaccatagactccctacactctactcccagccctgcagtctaagacagcatcttgcggggatgagtctaaggcaactgcaggggcacagataagtccttttattgggcattttccccagctcagggtcagacacggatgctcttgggtaacaaaggagtccagtgaaatcccctcccaagagtaaagcaggagaattgccgtggcaaccccaacctgaaaacaacgtaggcatgccaatggtgcagtgggggttcaagggcgtgattgggaaagtgttatggaagtgtctcagctagactttgatgaacgcatgggattcgtgcaggtagagatggctggaagtgctctccgggtaaaggaaccagcgcaaagaagagctcagagatgggttgtggtgggtctgagttagggtggccatgagacttcatcagaccggttggtgctgctcccacacttgggggaggggaagcatgttgtcagccctacccacccccacactgcctccccagcagattggggctgccagggagctgggatgggccctttcctcatccgtgcagggtgtttcattccacaggatgtggccgacctgaaccaaggccacggcttcggctctacaattaagaaaccaccacagttctgactctgcgaacaacagaggtgtttatcctgagagttatccaagttaaactggaggacgcctgtatgctagaaggttctatggaggcactgaagaggggtgaagccaccatgatgtaaattaaaggtgacatcctagtcatgtggtctttctgatggacagcacgagagccaggtctggattggtttaaaaaagtggagttggtttcaagggccacaaagacagccttcataactttaagactcattccatatgggtttaatacttacagttcctgagagctaggtgctttgcttaggcacggaacgcattgccttgccatccgaagccatgcattcaagaccatgaactgtgagtcaaattaaatgttgagtgttcctttttctgcaagaaaatggatgcctcagttgaaaagacagataagaagtgcagaaaaagaaagcaaagcaatcagcgtttcaagataacgatcccactccatggaatgtgggctccaggaggcaggcatggggtccagtctcatttacctttttgtcacctgtgtctggtaattggaagtgctccataaacagtggttcaaggaatgaagtaagagaaactcctctccagctaatgaaagtgaatgtttctatggggatgtggcagttatgagtggcaggggcacttgctttgtatttaggcttctgcattccctttagcccttaaaagaacattctctaggtagaacatttatcaggacaggccctgttttgagaaaaattgaaatattggcactttgtatcaaaagcacaggagcgagaacatgcggtgtttggttttctgtacttgcgatagtttgctcagaataatggcttccagcttcatccatgtccctacaaaggacatgaactcaaccttttttatcgctgcacagtattccatggtatatatgtgccacattttcttaatccaatctatcattgatggacatttgggttggttctatttttatattttatttagaataatgtatatctatattcgtaaatgagatttaaaaaaaaaaagcacaggagagctaccgtgccctctgggacagtttcacatggaggaattttgcttacctgaccgtcagcagggttccccaacctggagttcacttggaggtgctcattagaatgcaggttcctaggcctaccaaaccagattccctgggacagggccaaaaatctgcattttaaaaaataatttcaacttctattttagatgcagggggtacacattcaggtttgctacacagatatattgcatgacactgagatttaggataggaatgatcctgtcacccagatagtgggcatagcatccaacagttagtttttcaaccgttgtccccctcccttcctctctccctttggagtccccagtttctattgctgccatttttaggtccatgaacacccactgtttagctcccacttataagtgagaacatgaggcatttggttttctgttcctgcatttcattcccttaggataatggcctccagctacatccatgttgctgcaaaggacatgactttgttcttttttaattgctgtgtcatattccatgatgtgcatgtaccacattttctttatccagtccaccatgggcaggcacctaggttgagtccctgcctttgctattgtgaatagtgctgtgatgaacatatgggtgtgtgtctttttggtagaataattttattttgggtacatacccagtcatgggattgctaggtcaaatggtaactctgtcttacgttctttttaaaaattttttttatttttaatttttgtgggtacatagtaggtgtatatatttatggggtacatgagatattttggtaccagcacacaatgagcaataatcacatcatgaaaaatggggtatccatctcctcaagcatttatcctttgtgttacaatcccattagactctcttctctttttaaaaaatttgaaatatattggaaaacatggtttttgtttagttttttatttaacttttaagttcaggggtacatgagcaggtttgctacacaggtaaacttgtgtcctgggggtttgttgtacagatgatttcatcacccaggtattaagcctagcattcatgtcaagttatttgagtaatctccaagctgctttcctcagtggctgaactaatttacactgccaccaacggtgtataagccttcccctttctccccagcctcgccagcacctgttgttttagccatgctgcctggtgtgagatagtatctcattgtgattttgattcacagggaatctgcatgtctgaaagttcctcagatgaatcgagtaaatactaacacttgtgagctagcactgacttcttcaagcagcatgcctatcacctgtgacagctccttctgggggatgtggtgcacacagcacacagccacctcccccaggaccaccctttgacctccttcagtggtgaaaccatcccagctaccaacaagtgcagaggcagcaaaaccaaagtaaaccaggaagagaagtaggcaagaccatatatgtgactaataacaaagtttcttgcaaaataaaaaagccctgttatttatgtctgcagtgacaccctgaccacgcagtcagtgagtgagcaggtttacaagttcttgaaatgaatgtaagcagcactatggtataattatctttccaaactgcatttcacaaccagaagactggcctccactggggccattccccaggcaccatctacccacacctgggagcagcccccagtgggcttcagataatccgcccgccaacctttacaatcagctcttcattctttcctgtgttccctcacaccacattccttcagctgattgtggtatgtctccttacccttggcaattagcccttataaagaaaaaagtttcacctcctgcaagaagccttcctagattacaagagagctggttcctcccacctcctcaccccaacatccccagtgaacatttgcagatccctgagttactgaagccgtgcgggaagaatagaaaaacaaaggagaatctagaagcaaatgccaattttttttctctgtttcctggtgggcttcagcagacgtaggctgaaaatgcataggcaaggtgacctgtgggcttttcctgctggattagacaagcacatcccagggtcagcctatgggacatggacgcaacttggtgcagggaaccatactgagtgcaggatgcggacgggaaaggatactcaggccttgtccaagggctcggaggggtgcctctacccattgtccatgtgtctgggcacctgggtgatggaagatgccccattcggccgggggacagggctgcctgcactgagcccccaggaggctgaagaaagcgtttccccaccccaccccaggctctgtttgtggatgtggccaggtgatctcagagagccggctgatctgggtgggtgcaaggggtggttttataagttcagggttcttgcctctctcccctccccatggtgccactctgcggggaatttattggcattttggcaaatctcaacttggttcactgctacctcttcttcctaaagactttccaggacttcttggagtgtgggggtgttttcagaaggaatctgagagcacctccccacctcccacacacatacactcagcctgcaacggtctctgtcatgccaggttagaggaaccaggcaggctgagtgacccgggcatgtctccttgttttcaggaaaaccgtacaactcgacagagaggcattgaagccactctttcatgaatgagtcaggatgacaggtggagaaggatgtccccagaccccagggtcccaagcccttcacaggagaggtgggagcatccaccagccctcccttaagataaggccacctgccactgtggtttggcttataccacaatataaagtctaaaacagcaacttctctgtgagaaagccaaccaggggacccaaggcacacaaggcagggggaaggtacctagaatggacccgcaggcccccggctgccttgtggctccagagcccctgaggacagcagcccggggatggacttcggcgcactgtcatcctgtgactcccacgctttcccatgggtgcgttctggaccttgatcacaggcttcctctgtttccccagctgtcagcaagaacacagagtgggtgattcttgtctggaccaaggtatgcacaaaggcgattactatggcctccgagatttgcctacagcttgaacctgcctcgcctaaaagggcaccggttatggaagtcaccctgtgtacctgccaagccccagccccagtcaaaagtgctaagcaaccctgggacaaagccaactccatctctcctttcaatgcacgccagccacagtgaatccctcagcccaatggtgtcttcgggagcccctctccatgccccgttcttccagcagctccctgttgaggaaccaagtgtgcccagccaatttcccccagcacccactccctaacaagcactactcaggctgtcatggttggaacatcaaagagtcacctccctttggaactttttcactagcatcattataaaacacagatcaatgttcaagaaatcctccaaccatgaggaaatgaaggaattggggttcagtggccagcaattgcccttcccccaatccctgaacacagttaaaacttaatcaagtgaaatgctcaaaaatgaggagtataagctcattttcccatctggttcaaggaagccattgcaatctctgcacatcagtggcgaaaatcacagtctatcttcttgccttagcaagggcagtagagtctatataattttatcttgcttgtttgaatgcgggagtctgtacctgggggtcatttttttttttttcttttgagacagggtctcgctctgttgccaggctggagtgcagcggcgtgatctcagctcactgcaagcccgcctcctgggttcaagcgattctcctgcctcagcctcctgagtagctgggattacaggtgtctgcctggggatcacatttctatggcaattccacaagaccccgagatggtgctaacagttggctgctccctggcgttcattggaatgcggctgcattttctaaattcctttgtcctcttgtctgactctcctttgcttctttctccacaaaattatttggccaaaaaaaaaaaaaaaaagttgagttaactggggactctggttagctgttctgtagttgatgcaggtataattatacaatacacgtgaacattggtctagagcagcgccatccgttcatgacgcgccctatccgtgctatgcaaatggtagccgctcacgacaatggcaatggaggaattggattttaaattttatttaactttattttagtgtattgtattttcgagacagagtcttgctctgtcccccagactggagtacagtggcacgatgttggcttactgaaacctccacctcccgggtttaagcgattctcgtgcctcagcctcccgagtagttgggactacaggcgcgcatcgcagcgcaagccaccacggccggctaattttttgtatttttaatggagacggggtttcgccatgttgcccaggctggtctggaactcctgagctcaggcaatccacctgccttggcctcccaaagtgttaggattacaggcgtgagccactgcgcccggcaactttaataattttaaatctaaatagccacatgtgctttgtggctagcttcctggatggggcgggaaggacattgataggcagctcacgggagcactgggcaggaggccgtctggattcaaatacaacagccctgtgctgtccacgtgtggttgtgggaattcactgagacgacttagcaggagccccacactcagtttcgggcacagtgtagattctcaggaaagcaaggccgtgttgttctgatggaacccaaggtttggggtctagattaggccagcttcagcttctccatccccctggtttctacactccttcaggctcttcctaagtcaggcactgtagcaggctggcttgtgtcctcaaaaaggatatgtttaagtcctaacccctagtacccatgaatatgaccttgttttgaaatagggtctttgcagatgtgatcagtttaaaggtcttgagatgaaatcatcctggattgagggtgggccctccatccaaagactgggtgctcttattttaagttcaaaagtacaaccgcaggtttgttatataggcacacttgtgtcatgggggtttgtcgtacagatgatttcatcacccaggtattaagcctaaaacccattagttgtttttcctgatcctctttttcctcccaccctccaaaaggccccagtgtgtgttgttcccttccgtgtgtccatgcgttctcattatttagctcccacttataagtgagaacatgtggtatttggttttctgtttctgtgctagcgtgcgaaggataatggcctccagctccatccacgtccctgaaaaagacacgatctcgttcttttttatggctgcgtagtattccatggtgtgtatacaccacatcttctttatccagtctaccattggtgggcacttaggttgattctgtctttgctattgtgagtgctgccgcaatgaacattcccttacatgtgtctttataatagaatgatttatattcctttggggatgtacccagcaatgggattgctcagttgaacgatatttctgtctttaggtctttgaggtatcgccacactgtgttccacaatggctgaactaatttatactcccaccaacagtgtaaaagtgtttgaaaggggttacattccttagccccatcatgaggacctggttcagtgagcagagttgagggaaggtaaaacaggacctagaaatggccacagctagagcgccacccgagctgccaggaccaggctggactctgcacacgaggttgtccggggcagggcagggccagggcatgcctggagctgccaccactgtagcacagaacacggggtcttaacctgggtgaggagtcaggaggtctgtgaacttagataggaaagaaattccatttttattttccctgacttctaactacatgttggccttttcttcctcgcaaagtcttaacctgggtgaggagtcaggaggtgtgtgaacttagataggaaagaaattccatttttattttccctgacttctaactacatgttggccttttcttccattaggaacacaggcaatgaagcacactgtgggggacacacctgtgattgtcgaaatcacggatattttcatactgcattgcagctgttgccagtatcatcagtgactttcatccttctctctgctttgtaattatggtggttataaggcggacaactcaatcttgtcttaagctattaataaaaaacatgtgcactatcatatcacagttgggagggcggggtggggattgttacattttgttacattttgttagctgtatttcaacatactggtttccttgggaagcccatgtactttttttcatgcatttgaagtctgaattctgagaaagggtccataggcttccctaggctgccgcaggggttcatgacacagaacagggtaagagccactggcatggacactagaaacctacaccaatgctgttgtatcacttttcagacaagctctgtgcagtcggaattttttaaagatgcactgtcacttgaggaagacaggtgatcttcctgcggcacaaatagaagcaaagagatttctcttcttctctgtagagcaacacaattgataaatggccgataatctccaccaaattggcagcagtaggctgcccgaaggcagcaggcatattcgtctttgtgaattgttttactatgatgctgtcacatttccaggaataagacggttaaaatgatatattgttgtggtttggcatttgcagctttgctctgacttccctggtaactgccaacatctgcaaattattatgtgcttaaaaaaaaaatcaaccgccaccgcaggctgcccccacggtccctggctgggccaggcctcctgccaggccacagggcagagttcttggaccaggaggcagcagggtcaaaacccaggttgcctaggaagcccccaaagacagttatggatagagctgggagcccgaaacacatgcggcagtctctcagtttccaggtaccggttctcacatcatccatgcatgtgtttgaggaaaaacaaaaaaaaattgatggttgccaaaaacaaaaatgcttccatatcaaagtttatcagtgtcaatgtcaagagacttctggttcgtagactcattttggcttgaggccaccagaagtgaactctggtttctaaatgcagaagcagaggcactggccgatcatggaagatgcagggaactgttcaagaggcccaagcctggtgctcagaaacttggcaggatcaagcatctcgcccaggaattcatcccctgcttgtctaagccggctggctctcgtgactgactcggaacaacagagcagatgtttgcgtgggaggcaagcctcacccaacatctgtcctgcggcgggaaggcctgggtgttcacagatagagctggagttccccggtgggtggcacagacaattagctggggctgcctcacatgtaatctaattacaggggaaacaggctcaaacaccgggtgataagcagcgcaactgtttcgggtgactctgtaatttttcctccattaattttctccataacgcacatgattgtcataagggttaattaaaaagagcgtgagtggcctcatgtcacatgtagctggaccagaaagtgttgagtacctgctcatgcgtgcaagaggaggagggaggagcacatcactgaacttcacatgaaattggatacccgggattagagacagtagagggttttggtgaaatcagatacacattgcaaagcagcacaccgcgataattcaatttggatatactgacatggactgtataaacaaggagaatggaaggcaaaagggtgattccagggaggcttcctggaggaggtgagctcttcaaagaggtcatgtgcacaggtagaggaaagaaatagaaaaaaaaaaaaaaaagagcactagagccaaggacaggaaggatcacaaccatagggacaaggatccaaaaccatgaggttagaacctgaagacaaggaaccagactcaaggaaaaagtttccttcaaagataacggctgatgggtgcaaggaggtatcgagggatagaggatgtccaaccccaagctataagcaaaagtccaacaactgatatctcttgtttgcaacccatctcaaagccaccaagccttgtgtaaacatcacccagagtggccaagacaccaagtgagcagagcctggtgacatctaggatttgcacatagcaggcgatgaataaacccatgctgtctgacttcggaactttgacctcaagttcatcacctctagtatttgtggatgaagtcaatgatagagttagttcttgcttgttcatgaagcggatggtgcatcattctaagcaatgcataacatatctgtttttaaaatgtttttatatgcatcttggatcacattaaaattactttgcattttggaccatacaacaactgatggggttgggagtagggagtggacactccagcccttcctgcactgaaagaatggatgtgcaagccacatgctctaagagggtggaggcatcctcttacctaaatactagactggcatcagcagctgcaatccccgatctagttgccttgctggcagtatctcaaccaattgttttaatttgagacttcataatgacaatccaaagctcacttgattatgattatcactgaggaaggcattattcagagtgtagcaaatagataatatagctttatctacacagcatcgctcagagtgcagcaagtaaatcatatggcctgatctacacacacacaaacacacacacatgaagtcaggaatatctgacagtgcagttctagtgtccccaagcctgtgatgggtgtgcaagatagcgccgtcctgggtctggcccgatccacgggcgtttggattctgggttggctcatcccctgggctttctctgcttctgtggatcccactccagagagtgctggcatcgcctctttcttcaggctctgaagcctctttcaattcagaacttgaaattcattgcagagaaccctcagtcgttttgtctgcaatcaagtgacggtgactgcattagtccctggggctgccataacaaagcaccacaaacgggaggcttaaaacaacaggaatttattctctcaccgttctggaaaccagaattctgaaatcaagctgtcggcagagttggttctctcgaaggactgggagggagaatctgttccctgccttgcctttagattccgctgcttccagcagtccgtggctgtcacatggccttctccctctggagtgtgtctctgtgtctgtcctcctcttcttgtgatatcacgagtcatattggaataagggcccaccagacaccagtatgatttcatctcagctaactgcactggcagtgaccttatttccaaataaagccaaatgctgaagcagcaggggttaggacttcaatgtgtctctcgcagggacacaattgaacccacagcagtcaaatacatagtccttattaaccatacatgtaggtctgctttctgctgtgtctaacagatgcgcttttctgtccgaggttgaaaattaaggcagcttcctccctgccagggtaccccctgcacaggcccctgccacagctggtggttactagaagtctttcatactcttcagtcctgtgacaataatttcgtgtttccatgcacccatatacagaccctagcgcttttggcaggaagagaagaatttctaagttgaggctgtttaaaagcgtctccccagtgaagggtcaccagatttagcaaataaaaatacaggacacctagttaaatttggatttcagataaacaatgaataattcttcaggataagcatgtcccatgcaatatttggaacacatttacactataaaaattacgaaagttcatgttgctgggtgtcctgtatttcatctggcaagcctacactgccggcaccagaaagtccttgaagtgagtctcctgatccttctccacccccaccctcagtcctggctccatctgccctagaggctgagggctttctatgtaacccccatggagacagggcattataagatgcaaggatgtgaatggaaaaaaatcacaagatctatacatctggaaaggggatctttatttcttctaaaggattacagcctgcagggtggccattctgacaggccgggagacgcagcctctggcagaaacagctggcaggcacctggaaggaggcggtgttgcagcaggagcctcatgctgaattgagctggccaaacatacatattcaggttccaggaggagctatgaatattcacaaagagagtcctgagccgtgcccactgaacatgcacgttacatgcgtcccatgttcactttggggtggaggcttcacatttaaaagcattacaatgagtccctacacgtcaaaaggtgaggcagggactcgaaggcatacaagtgtgcagcttctataatcagcctgaaccaggtctatggttggtggtctcttaccaggagactgaaatcaacctcttgtccaatcaaagctatagtcacagctgtggaacggggtcagccagcgtctgcaggtggatgagctgcagtcgtttgaatctcggggccggtgcgtgtttagctgctgaagaaaaagaagacgctgtggtgtgagagcagagtccgttctctaagtgtagagtgcgcggctcgacccttacctggcgtggcctgaggtgctgcttataatttggtgtcttattgccataaggagtctgtgctgtcggtctcgtgtctctattttagcatgacagccgatcatcgtcgtttaaaccacaaaggggagggactgtgatgaagcgtgtccgatcgcccgtcccctcatggctgggagctcagctttcaggtttctctggggtccccttggccaagagggggtctgttcagtcacttggggacttcggattttattttagttctgaaagagtagcaaatggggaccaacatggaatttgaaatgtataggaggtaattcccaaagtaaaccgctccgtggacgtgattcagatctgactccatgacagtgctgtccccttccctgccaccgtactcctcaaggagctggacgcgtcctcgcaggagtgagagctgcctcgtccacacccacaaagaaagaactccactcacatatttccctgcaaataaaggggctctgtatgtaattaactgacaaaaacgcgggtggaattgcaggtttggaaataaagtataaggctctataactcagcctggctccgcacacacaagccgtcaactgacacctgagctggactgaagcgggaagggggctggcccctggtcaacacacactgaacccagcggccagtacacatcctgttcagctgacatgggctctgcagagaattccagctccctctattccccacccctcacacagaaacctcttatccagtttgagagaggtgtgtgcatgcatgtatgcacgtgcgtgtgcaggcttgtgtgcgtgcctaatgaaaagcagcttgttcagagttagtcaaaggctttgggaatgaaacgcggctttgagcccttccacagcagctttgaggggaggcgtgtgttggtcagagcatgaaaccagacgcctggaacaccgcccagccaaacccacccgcagctctgatgcaggagctcgcacagagcatgacacgtttctctgggtttgttttttctttatctacaaagaagtagaaggagaagggaaaaggataggagtcctaaaaggcttattactgcccacgagggtcactggaattgactcaagtcagtgaaaggctttgaagattaacgggcccatataaatgttaatttgttatgaggtttctgctaggacgttaaacagagcagggaagacttgcctataaaacacagcatgcagtccttggttataattaatgcctataaaggtctctatattggattcagtcgagggcctggcaggagggcagtaaggagccattccagctccttttagaggcgaaagtggggctgtggacgaataggttcctcagaacagtcactgcctgggaagcaaaaccacggaatgaaaagctagggacagtcccctaacgtgggggtggggcaatcaaagggagccgcctttgaagagccctgagtcccttgaggggaaggcggcaacaaagcgccgcttgtccaccatcacctgcagcatgctttccttaatgaggacgagacccaggtggctcggtcactgcagctccctggaagggaccctcaggcccccaaactgggaagtccccaccttcccgcagactcaggatgcttcttgtgggaaagcacacccacacttacagtgacagcagtcacgctgacctcaaaaatcctccaggaaaatcaaaatgacaccaattcacaggatgttccccaaagtcctagtttcacaaactggaaaacagcgcaacccagctgtggtccagaggtcctggtgacctggcagcgacagaatcttctcaggctgcctctgtgctgcccttctgtgctgggatgcacctgttggggaaagctggggttaggaaacccagtgggtgaacagggagaactcaagaaccagcgaagaaaagcaacaacaggcatattcacattttaaaatgcttcaggtgcagtttacatactctgtagaggttggtaaaagttacacaaattatgcaaatatcatgtggctcacctactgtcatggacaatattgtgcaccccacaaaattaatatgttgaagccgaactcccagtcaggggtgactgtatttggaagcagggcctttaaagaggcgattaatttaagatgaggccgtttggtgggccttaatccaatctgactggtgtccttatagaaagatacagagaccccaggatgcatacaggaggggcctctgcaagctgaggaggggactcaggagaaagcaaacccacgggtgctttgaccttgaacttgtgacgttgagcttccagaactctgaaaaataaactcctgctgtttaaacccccagtctgtggtcctctgccatgacagtcccaacaaaccaatacaaagacaatcagagagccagaggccacggggctcctgccggtgtgggtgccttaggcaacacgccccatccctggggtcctgggcgcaccaaacccacccctggctcctggataccacctcaggaccacagctccattcatccagaggccaagtgggcagcctgaggcagtaagaagaacactcactggaatgagccgttcagggctttgggatcccctcctccaggcagccttctctggctgcagccaccctcctctgagccaggtaccctgcactactcctccaggctctcaaagaaccctggagtcccacgtatcagagcactttccacaccgtgtgctgacttcccggctcccagagcccagccctaggagatccttgttctggggcacgtttctgcctttccttatccctatctttctcctcctcactcagcacctggccctcgatgagcagggttctcatatttaacagctgtccactggtcatgacacctgggtgctggagggagcaggagcatgggcactgaagcctgctgggcggggggtccagatgctactgagcggagaaggaaaggtgtctcggcagagtgaacagtgtgtgtgccggcccagaggtgagccgcagcagctgcggtggctggagaagttcaggagggttgtggaaaaaagcaagaggaggtggggagggcttcagagggggctggagaggttggtaagggctaggccaccaaggaccctatgagcagttcagggctttaggatctactgagaagggaacaaccctaggggttctctgcaggttgcaagccctctggccccccagtggccaggggtcttcaaatcccataacccccacccatggtattctgcccctaaggatgtccacggatgagaagattggccttccaagattctccatcaacccctcagcgaggcttcagcagcactgagcccagcagagacttctgtagcacccgaaagcctccttctgtcttgggagcctcatctgatctgctgtatcatgcgtccctgccctctcctctctggggcctctttccttccatcatcaggggaacttgctcccctgaaaggagagggccaagatgggaacattgtgctatgtcagcagccagacacacagcccgctgagctccaaacaaaagaagtcccaggacccaggcacctttgtcaaaagacagccaatgtagcctctgttccaggaaggctccagcctgtggcctgtgggggtgaagacaagctcctgcacaatctggcccattggatataaaacatctatttgacttcggagaggggaaaatatatcacattgctaagatgtccttggttgcagtgaatagcccagggagaggtggaacaattcattccagagaccagcatgagtgaggaagttgacaaggacaacgtggggctttccaaacaaaagaaggaagaggccaagataaggatttggtacatttggccaacaaatggaggaaataatcatttccaaaccattcttgaatgtgcatttcatccatatttataagaatgcaagcctgcacacgctttccaccctgtgtcaccccatcatgggcagggacttggtttacagacttttatatttgcagatggcatctctcgtgcacatacattttgcgtatactttgacataaataaacccggtttggttttaagaaattttaaacaagtgatgtaaaaatattgaaataagatgctaaggtttatttggagttctcctaggatgctgaagaggtggaaagaataatttccagaatgaaataattcctcaaacatgttagacattatatcaactctagcacaatgctatgtatgcagcaagagggtgatagtatctgtgattggctgaattaattaatcaatcttaggcattcaacaaatatttattaaacagttaaatgaatggaggcaagggataggattggtgcatttaagttcacatgttaacaaacccccataataagcttcagcagttgtacaatttgttgttggcatcctaagttctgaaatgcaatatattctacattttctcccccttatttcctctcccaaagtttctaaaaaatgaaacaaaacatccgtgtgcatgagtgatccctggcaacctgccatagtccacattccttctctctgagactctctctgatattcagttcttggcctccacttgtccccagatcatgtccagacggctgcaggctccaaatgcccagaagtcagctaatcccaggatcggcaacaaaccttggctctgggcagacctcttaccttttcaagagctttttcattgggtctttgattttatttcaccaactctgtgagtcaggacaggcatgttctcgtattctcactctctttcatacagacacatacatgcacaaacatgaacacttaccccacatgctcatgctcacctcatccaaggaacccaaggccctggcgtccagagaatgagagctcccggggctagctgctgagggtcaaggccgaaaccagctcaagatttccttcccccaccagtgccgtccctgtccccatgcagggcaatggtccacccattcccaagaaaaggcctccaactcccttcgtccagttccctgcccctgggcctgtcctcattctcgctctgctgaagttgacacaggcctcgctcctgtgcaggggtgggacgcggtgggggagctacatttagacaaggaaagggcccccaggcttctgagtgcgcgtacacacagacaggcctctgggacatattctggatggctctgggcagatggctgtgtttcctcttttttccagaaaaaaattccagacgacgcaatgatcacaaatgccaatatcctagtaattgataggactggatcacactatgtgaaaagaaaaggcgccccacaggctttatatacatgtgcgccgtgcacgctctctctgtctctagctctgtctctgtggacctgtgtcaatgctctgttggtctctgtctctctttgtgtgcttctgtctctctctgtgtgcctctgtctctctctgtagctctgtctctctctgcctgtgttcccctatgtctctgtctgtctctgtctctctctgtagctctgtctctctctgcctgtgttcccctatgtctctgtctctctgtctctgtctctctctgcctgtgttcccctatgtctctgtctctctgtctctgtctctctctgtctctgtctctctgtgtgtctctctgtctcccctctccctctctctctctgtctctcacacacatatccctcactgtgcgtccaactcagctcaagcccgtctcccttgcacttcctataagcccctcttggaatggcctacccagaaggggcactcaaaagtggggacgcattaactttcagaatatctgacctcgccacatgacctcagccggactctgggtccatgcagggagtggaaaatatccccaagtgtagctgagatgaggccttggagttaagaggtgagcagaggagaagaaaccagagaagaacattagaaagaagagatttggaaaactttctttcattaaacaaatgcccgccatggccaagcaccttttgtatgtgaggtgctgttctagtcaccgggcctgcggcaggaaggatgagacagcccacccgcaggaggctgactggaagggaacagcctcgggagacagagaaagacaggaatgaagcgctgggcacagccagcagtaatacatgcagcagaagaatgaagcaaggtgagggaagaaagcgtagggggtgcctgcaaacttaagcagtgaattcatccaccagggctgccatcacaaagtctgcagactgggcggcttaaacaatacacatttagtttttcacacttgtggaggctacgagtctgagatcaaggtgccggcaaagttagtttctcctgaggcccctctccttggcttgcaggtggcctcttttcctcgccaggtcttcaaacggtcttccctctgtgtgtgtcctaatctcttcttataaggacaccagccggattggattagggcccaccccatgaccttcttttatcttaattacctctggaaagaccctatctccaaattcagtcacattcagaggtgctgaggtttgaggcttcagcctatggattttgggggacacgattcagcccataacagatgtggtgcaagctggacaccctctgtgtggacccgcagacccacccttcctgcttttcttctctgccctttgccccaggacaccgacctacaaaatgcatttatgactccctgcctcccagccccatgaagcgggagcacatgaagacatgccaaggagggaggagggtgtttatccccggcccctccctgcttgcttgcttcaggcaggcagcatctctctaccctgaggcaacagcacctgttaggagatgcacctgctccatccagctctctccccaggttctgctgatgataatggctgcctccccttggcccttcagacagagcactggtaagttctccccactgtctctagacctggggtgttgcaacaacctaaaccctgcccccagctttgtaatagtacctttcctaaattctactcttaaattgccacatcttagtgggccatccgaccaatacagggggatcaggcaggaagaatcagagaaagaaaaaggaaatcaagaaaaaatggtgtcccagaagccaagatcatttcaagaagtggggcatgatcttgtgataagagttgcagaggttaagaacttgaagagaggccatgcatgtaggaagatgtggggggcccaagcaaccccagtggttggggcagtggaaggcaggatgctcatcaaagcaaaataaacttagttaaggagaagtaggggcagatttcatagtcagaaaacacacaacaaccttatccatgccacagtccacattcaacaagcacttgttgccttgaagccctcatgactccccagtcctgcgtgcaggacacccatgaatgtgtgtgcatgtgtgttgtgtgtgtgtgcatgcgtatatggacacatacacagacaagtgaatgacctgtgatatggggttttattcaattactgtatatagtatacagatatctaactcccagaatgcaaggctgagcaataaatattaaataacaataaatattaatctagctttgacaataaagccttatttatgaaagccaaacctctccaaagatatgttttatattactccttaatttatgacacaatctttatatttttgttattttggcactaaagccctttcttttttaatatactttatttttaaagcagttttaggttcgcagcaaaaccgagcaaaaagcacagaaagtttccatgtactccctgtccccgccaccccacataagcctccctcacgatcagtatgccacaccataatgtccagttttaaaatatgctgcaacccatttaaacaaccatagaacgttcccaaaatcttcctgacaacaaacagcatgaatacgtgcctactggccgggagtgagaaccaagaggttgaagactttcttccatattgttctcaaagccaagacttaggcctacagcaaacatccagccacctccctctgccttggccgttctgtcttgataaccacagctgtatacttcagcagtttcaaccacttacttcccaagcctacaaaatctcccttttgctccagttgcaaggggggaggcattggctaaagcaaatcatagtctctgtgggtacacctgggaggcaatgaaacgcaatagctgaatgcccccatccccacagagacagaactatagtagcctgccattcactcacactgcagaaacatctttgtctaagcataacttcgtccagccagttacaggaacaagtggcttcatctcaaagtaaaagttaaaaagaaaaaaaaattaaaggaaactgggatcttttggctcaactagccagtcttgcatctggaactaaaatcagaggccagcctcaaaaatggacaaaggacttgaacagatgtctctccaaagaaggcatacagatggcccgtaaggacctgaaaagacctgcaacatcactaaccattagggaaatgcaaagcaaaaccacgatttactaccgcttttcaaccatcaggatacctagtgggtttctttttttccattcctttctttaaaaaaaaaaaaaaacttttattttaggttcgggggtacctgtggaggtttgttacataaataaactggtgtgtcatgggggtctgttgtacagattatttcatcacccagatatgaagcccagtacccaatagttatctcttctgcttctccttcctcccaccctccaccctcaagtagaccccagcgcctgtcatttccttctgtgttcatgagttcgtatcatttacttcccacttataagtgagaacatgtggtatttggttttctgttcctgtgttagtttgctaagaataatagcctctagctccatccatgttcccacaaaagacatgatcttattcttttatatagctgcgtagtattgcatggtgtatatgtaccacattttctttatccaatctgtcattaatgggcatttaggttgattccatgtgtttgctatgtgtgcatgtgaacagtattccatgtgaacagtgctgcagtgaacattcgtgtgcacgtgtctttaaggtagaatgatttatattcctctgggtatatacccagtaatgggattgctgggtcgaatggtagttctgtttttagctctttgaggaatcgccgtattgctttttacaatggttgaactaatttgcactctcaccaacagagcataggagttcccttttctctgcaaccgtgccagcatctgttattaattttttttactttttaatcatagccattctgactggtgtgaaatgggatctcactgtggttttgatttgcatttctctagtgatcagtgatgttgtgctttttttcatatgcttgttggccgcatgtatgtcttcttttgagaagtgtctgttcatgtcctttgcccaatttttaagggggttgtttttcttctgtaaatctgtttaaattccttataggtgctggatattagacctttgtcagatgcatagtttgcaaatattttctctcattctgtaggttgtctgtttactctgttgatagtttcttttgctgtgcagaggctcttaggtttaattagatcccatctgtcaacttttgcttttgttgcgattgcttttggtgtctttgtcataaaatctttgcccattcctatgtacaggataggataccaaatattttttaaaaagaaagaaagaaaagaagaagcgttgtcaaggatttggaaacatccgaacacttgtgcattgctagtaggaatataaagtggtacagtgtctgtggcatggtaattccttgaaaaattaaacatggaattactacatcatacagcgattccacttctggatatctacattagaaaattgaaagcaaagacttgaacagatatttgcacaacagtgttcattattcacaatagccaaaaagtagaaacaacccaaatgtccatcgatagatgaataaaatgtggtacatacatgtaatgaaatattattcagccttaaaaagaaatgaacttctgactcatgctgcaacatagatgaaccttgaggatattatgctaaatgaaataagccagacacaaaaggacaaatactgtataattccatttacatgagttactgagaataatcaaatcatagagacggaaaatggaatcgtggttaccaggagatgagaggagaagggagggagggggttggtgtgtcatgggtacagagtttcagttctgcaagataaaaaaaagttctggagatggataatggtggtagttaggcaatagtatgaatgtctttagtgccactgaattgtacacttaaaaagggctaaaatggtaaattttatgttaggtattttaccatgattttttttaagttcacttaaaaaacatcaggagcctgcacccctttttgcaccaagtcttcccatcagagcagggacaggccagggaggctgcctgtgtcacagccacaggagacagtggtttcagatggggatgggtcctggagacatggacaacctcattctctcctgtccaatctctcaccagggatgacacgcagctaagtggtggagccagcagccaacccagagacccttgtccttatccatcttctgctgtctgtgcccacaacccagtctccaccactgtgctgaggtccgtctactcaggcccaggcagatcatgcaccatacattcctctctgttcctaggttcaatctttgcctcaaatgccctttgttctctcgagctggaaaaagaacatctgaggaagatattgatggctgacagcaggaaaatcagaagtatctttgcaaattagaaaataaagtgaaagacctcatagataacactttctacagaaactcagctttgtttccctattctcgtcccatcattgttacattcctggcccagctcaccctcggcaccgggtggcacagcccaggagtgaaactgttcctcacctcgacaagccggggggacatacaatccacagagcccccagtttatttggcctccccgtaggtttctgctgcagcctgagtgaggtttacatttataaggagaccctcattctcaatcttataaggtcctcttggaatattccagacaggaatggagctgacaagatgcttggaagggtgcagggctgcacgaagccacctgtccatttccccaccctgagacagggtcgcagtggatgagcacccgctttagggacattggaggtgggaagcccattgtcactcctgtgttgacatcacacgctagaagggagtctgtttcctctccctgaatccctgacactgcaaggaagttatttcctcgaactcttgggaagtaggggaactcctggccaccagcctttgtttaacagcccttcctgttgtcaaagagtgatgcccccaccgccccctggctctgctgcaaagcaggtgatttaactttgagtcatctgggtgacttctcagaagccacagaggctcaccatggcctgtcacaatgggaagacagctgagtgtgagacacatggagacccagccttgaccaccactggggaggacaagctcaggagaaggaagaggagtgactgggagggaggaaaacacaataggacagtggctccacaacttgagcgccacaaaatcccctggggcctgtgagaacacagatgttggggcacctccccagcatttctgattcaggagggctgggcagggcctgagaatctgcatttccaatgagtccagggtggcgctgagcctactgatgtgggattggataaggatgccccgtgctggacatttctggaagggacccacccaccctctactgcctcaggaccagccttggtgcccaccctcctccatccccacctttgtgcccacagcagggctgagtcctccccacacccaccaaccaccccatctctgctgctgctgtgctctgctcctcggacagtcctgggtatttccgtgtcctgctctgctctgcatctctgaacgctgccccaggcctacaccctttgcaggggccctgacctccgtgatttgccagttacctgctccttataaagcccccacctgcaacctgactgacagactcagggatcctcgtacctgcctgtgatgtcttttcctacctagcctgacctcccatctgcaaaaccctcccatccttggatgcccagcttcacatcctccaaggaccctcctctccaagactttccaactcccaagcgcccacagagcagtcactgtttctcaactatgacttcttatgagtaacactgaaaacacagattcctgtctgtaccaaaaacctttaaaaattaagaattagctgggtgtggtggcgtgtgcttatagtcctggctactccggatgctgcagcagggggatcgcttgagcccaggagttcagggttgcagagatgttgccactgcagattgaaaccctgtcactaaaaaaaaaaaaaaaaatacataaaataaaataaaaataggtagatagatgattgatagatatgaaggtatgatatagagatatatgccatacttcattgttattgagtgcgtgcttttgcaaactcatcccctatgcacactgccccacctctccaacccagatctggaatacatccccaggcaggagctccaataagtcactcatctatgttgtattatagtaattgtttatacatatacaaacataaatttacacttattgttactatttgtgtgtacatatgtttatggtaggcagaataatatcctccccgcctccagcaaaatatgacaaaatagggccatctcctaatccctggaacccatgaatatgttactttccatggcaaaagggactttgcagatgtgatcaaggttgagatgggaaaattcttctggactatccaggtgagcccaatctaatcacacgagcctttaaagtggggatcctttccccgatgtgggcacggagaggtgtgagcatggaagggtcagagacagacgaaggggccaccagcccaggggcaggaagaagccgggaagcacaggagaacagaatctccagaaaggagagcagcgccgccaccttcacgttagacccaggagacctgggtcagatggctagccaccaggagtgtaagatgctaagtttgcattgttttaagccactgtgtttgtgataagttgttagagcagcagcagaactaatacagcgtgtgcgtgtgtgtgtgtctgcatacacatgtgtgtgcacttgtatccctgctatgccagagttcttaaagacaagatgcatgctcaaatcacctttgtatcccttatggaacccagaaggaacgtcacagtgtgaacatattagtgtaattccacccatatattagtaattcttaaatgacacagaatgtacattgaccggggctgacattcatttctaagccaagaaaaatggtaatgaggtgcaaagaggaaacctgttgcccttgggattatcaaaatctctcacctcagaagaggctttctgggagacgtcatggcccaaatcaggccacaaggaactgcgtctccggcctgtaattatttcctttgacaatgatgcgctagactcatgctgctgccagtagaaccctagagccactgcacctccttccagggcctccacctcccactgatccggcccagaggcagagcagcagctacaagggccaagtcacagcatggggcatcagaagaccccaggccgggccctaccctctagcccctcacccctctccttgctgaatgtggaagccagctaagtccaggcaggtggttggagggatagagaaggcccagggaggttctgggtgccagatgcaggagaggagaccaaaggtggggagaagagggtgttcccaggaaggagacgccctgctgggaaaccctgaccccagccagtggccaggatgccagctctctgctgagcctaacaagcctggtcgcacatacagcatcgaagccccagtcccaaccagctgggccaggtgtgtgatgacatcacggctctaatgaccccgccaggtgaccaaaatcaacctcgggtctgggataaagagtcactgacatgataaatactgaaagccaagccgataagatgaaatgggtgggtggtttcccttaaagagttactgaagggttgtccaagcctttgacaaccttcatcagatgaacaattattggttgcatggttggtgcgagccaggtgtggatgcaaaggtaagcaacacgttccctatctaggaggaggcagaataattaagatttcttgggaataaaatctgacccagctcctagcacctgctcaacaatcttagctcttttatttacatttattcagtctcagatttgctccccgcttcctgtccccatccctcagctttttcttttagagcaagcatctagtccttctcttgataccaatgcaaatagccgagacccttccattcatgtaagaccccatcttcttccactgctaaagaactcttgacttagtacaacataaaagacttaaattgttttcggtttatctacatgaagcctggcactctaaaatttccaaaggatatggagttgctttgtgaccttttgcaacttcctttctttgcaaaacaaaaaaaggtgtccatccttcaagcagccagttaggtggttgataaatatccgagttctaagaaagaggattaccaagggaagagataacttctgcacctcctcacaagagtacagtgtgcatgggatcctaatttctgaacctgggtcttccatttctaagtcattctaatggcagatattatgaaaatattctcactcccccacattgctcagaatcttcttgtcatcagataatgtctcatagaggaaggagtcattttctgggagctctaaccacaaaaaacatctggagccttcttagaatccagggttaaaggtcagggtgactggaacatttgggatggtcacatcgttcctctcctagctttacgtcagggaaacgtggtaccacagtgtgattcggtaccacagtgtgattcagggctgcgtgtgacatcaacctgcatgctctgggggcacgagtgtgccctcattaaaaacaagccctcaagagatgagaaccaatctttggagacaccagcattaaatgccaggagcttggccgttggctgtaggaatttcccaaacagcaacatctgttactaaggaaacgacaatatcactgcaatcctctagcagctactgttttacagcacggaccagagagacaatagtcttgcacctgctcactcactctgtcctcccagcagccttgccagggatatgtgtatgacatcctcagcacaccctcggatgtgatattgtgtgaatcagcccattcctcagatgaggagactgaggcagctgggaagtgtaccctgtttgggtcacatagtgaggggcagagctgtgacgacgaaggtctcccactccagccccctccgtagagccctgtccacggcattcaggccaactctcacacccgctgagtggctgtttctcagagtgtttacatcggtttcctcagctctgcagacccggcctcctctacttcctcccttgcctttctctctccagcacacgctcacaaagaggaaaaaggccaccgcagtaagccaagctgtctgtccagcatggaccatgggccgacaccacgccaggcctcctcttgaacctattccctacagaggccttgccagcagccacagagccttgagcaggaagcgggcgggggggggggggaggcggggggcccgggggggcagggggattggcaggagggtgggggagtgccgaggctgggccatcaccctgccagatgctggaaggcacttgcttttatgctttcagaggcaggtccctggaagaaggtctccccagctgtatgcatttcctagggctgctataaaaatgaccacaaactaggtgttaattcttttgttcttgaaacaacagaaatttatcctttcatagttctggagggcagaagtctggcaacaaggcagtggcagggccacgctcccctgaaggctcagggaggaaccttccctgcctgtcccagccaccatcctcggcattctttggccgtggctgcaccgccctcatctctgcctctagcttcacgcggccttctccctgtgtctctctccccttcctagaaggagagcaggcattggatttggggccactctaattcactatgacctcatcttgacttaacatctgcaaagaccctgcttctaaataaagccacattctgaggttctggttagacatgaatttgcgggggacattactcaatccacttagcaatgtcgtgtactcacctcctctgccaggcctctctggcaaacaagcaggagtctacctgtcaccttccaactcaggaaggtggggcttgggtcccagcttcccgcttcctgcccccatccctcagctttttcttttagtgcaagcgtctagtccttctgttgataccgacgcaaatagccaagacccttccattcgtgtaagaccccatcttcttccaccgctaaagaactcttggcttagtagaacataaatgacttaaattgtttttggtgtatttacatgaggcccggcactctaaaatttccaaaggatatggattagtggatgggatggggggatgaaaggacatcaagtttgactccatccatacttggggaacaactgcaaagtttcctgggggtctatgtaggctggaaaagacatggtcccaaagttacacagccttcatttctcagagattcagtcttgcacagaatgtcaggcaaccagttttccaacttcaggtttctaagtcgatttcttctcaagttctatgcatctgtctattggaaagtcctgcagctggggtcggacgtcccggctgagcttcaggactttatcacattgggtgagcccatgggtcctcagtcagagattccacggtaacatatagagagatgagggtagaaacgtagctcactgtggcaaccccatgaccaccaatggggaccgccacagtgagagtgcttcccaagctccacgagccacccaacccttcctggtcagatcggatcaccccaagtgactgttgagatgcactcagtgggtcagaaaggcaagtgggtgagagcagatcacagccctccaagagcaacgttctctaggaaggaatgatccagagaacagagtgggtgtcagatgacttgggagagacactgttccgtgtagttgaggagattcaagatttaaacttgaagagctgagtcaagtatgaaatggggcttctgtttttccactgggtttattcaaacagtaggtcccctgcttcttccagccctttctgtggtcgaaagacatcatcggtcatgtactttctgtttcctctgtcctgctggcccccaggttccagggaatccttctgccctccagcaagatgacacctgatgaaaaaaaaagaatatcgagtcagttcaagctgtgtgcatctccacagcacagctagctgccccaggggactgctcaactcactttgtacttgaaacatttctttttttaacctaatctaaatttaggagctagccaacagaatagaataacaggaaaactcacgccaaagccctggcacctcccaccctgtcccacccagcttccagcttcctctttcctcagccaagaaccctgacagcctgaccctgctggcagaaggtcctgtatttcccagcagctgatggcgaagattcagagcctcacactggagcccaccctgcagagctccttccagctaaggaacaggggccagagagctgtgcacagcccacggcccctcacagagggggatcccaggcagaaaaggactcaaaatccaaatctggccattcacaatcccctccctgcatttacttcctcattacccttacaagtatagagagaacagaatcgtttctgttttagcataatgtttgttagacaggttgtactccacgggtgtgaattttctagaaaaatgtttccattttatatttccattcagttgacaatataaattttaaaaattagtctactttcataaattcacagttgaaagacagttttgtagaataagactaacacagtattttacaaatgagaagagaacccattgttttttccccctttaagtgggatctaagcattactcaaatttggaagagagaaaaaaagcagcgttagaatagaatcgataatccagtggtcctcaaggtgtgctcttggggccagcagcgtcagcatcacctgggagcttgttagaaatgcaaactcctgggcctcacccagatcttctgaatcagaactctgaaatccgtgttttaacacgccctgcagggaattccgacacaacctaaacctgagaaccgctgttgcaatctaatgaatattcaaattgttatgctagaacctggaattctagcatctcttagcacatatttttaattgaacctagggcgtttctacacatattttcacctgtcacctatttccctttggaatgggtccctttgacctattatatgatgcctcagatcccaagagagatttcagcacaactcctggagttgctgtatgatggagtaactacaattcacagggtttgcatcattcgctgagcaggtaccagacaccaggcgctgcacaaattcatttaatcctcccaacaaccaatgggatttaaaataacaaactaaaaaaaaaaaaccaacaacaaaaaacactctattaacttcatttcacagatgagaaaactgaggcccagagaagttaagcatcttgcccaaggtcacacagctgattgggacagagttagagctggagctcacgttgcctggtccccatactcacaagatgttgaccctgcaggaaagaaaaattatctgggatgctttctagaacaggatagacatctaaacctctagggacttcagaggcaatgaagtccactcctctatttcacagatgaacatactaaggcccagggttcttacagggcaatggtacagggtcccccagctggctgcagcagaaccaggacaaccctgaggtctaccatactgtactcttcacttagaaaagccacagtccctgggtggcagatggagaggacagggcttaggtcacgcgtccacaagcacttggcccacttcaaacgctttcacggttcccaaaatgcaagaactagaggcctgacctcatgtgaacaaagcatttttgaattctaattaataatgagccacataattatcttctttggaggagcatatttaacaggaataactccagcgctaataaatcagttttttctaaggaagtcacgacttttcccaccttgtcacctcagagaggatttctgctctaagctgtttgagcctgttcctggtttctatgaggcagagaagccagactgtgctggtggaaacctttttttctttttcttcctccgccaccctgttgcttgttttcaggtgctcttggccccccgaccctgctcccgtctgtgtgtcttctgcttttacaaagggcgagtttccactgtttcttctgcaatgctcaaacatgattggcgtccacccctctccctgtgtccggaactggtgtttgagccgtaaccatttccacagccttgactatttttccctaacaaaatacacctttgaataaatggccttattgtgctaccaccttggcctcttgaatgacagtttctcctcatgtgattaccgtgtagctttcactggagatttgtttttcccaaaacagcctctgggataaaagccctctggccctgctgtggggtcactggtagcaacatgcctgcctcgtgcccacttccacacaaggcatggggccatcagccatcatcccagccctccaagaggccttgtaaattccctgggaagacaagtcatatgctgaattcaggaatataatgcatcattcagtaacttcagtaatccccatcctgggggagccacagaacgggggtgagaaatcacagaattacgacaaggtgtctgggaactcaggtgtccaacaagcattgtctgaaatctgaacaaatctgattgactgttttgcaataaatatgtaggtgctattaaggctagcaaaaccccaattgccttaaaagggtcaataatttatttataacacctatttgacaatagttattttctcaaccaacaaataccaacctatcccatgagtcttcaagatgtgttgacattacaaaggaccctcattccaaaacactgggaacccctgatccaagcagtctgtgtcctgggaggtgaagatatgggggtcacctcagcagggcctggggaaaggctctttgaggggaggggcttctcacctgcttttgtacaggcagtggggtggcagtgggacttaggtaagtgggcagtgagtgggcagggcccacattccccaaagggaagagactgcggaggtgtgggggaagaaacagtctgccctcagcttttgttgtgtcctccctgcactttcttactagcagctggaggtcagaaaagggtgtttgttcagggctgcttgagtgggtaacgagctgaacctctctgaacatggcttcctcttcacagcctccagcacccatgacctggctcactcccctcctggccagccaagaccggtcagttggaaataacagcccccagagccaaggctgacgctggcccaaggcactggctgtgtgttctgccccagccctgtcgggccagcgcctccagtaaggaaaagagacttgctccgtggagcttccaatgtgttttggggtgggaggtagggatttggagaggaagttggatcacctaaaatgctgacaaacagacgtacctttgcacaaacaatgccaacatgctggcaggattaaagtcattcttgttgctgtgaaaccattttgattatataaataaaatagtgcatccccattgctgacctccaagataaggaaagcttgccccacatccataaaataagaatattcttttgaactagccacacctagaggctggctgtcagggctcctgaggggccctactggaatcacaagccatcctagccggcttctgtgccctcattcctgatgcagcctcttcctggggggataattgagaaaacccaacgcggatcaggccctggtctccattggctccctgacctcgcagccagggctactatcctgagtcttaaggctcagtggcaccagtagctttacctccaacagccagaccccgctcccagtttcaatccttgctcctccccatggcttccaggatggacccaagctccggagagatgtgcgaagccctcccagctctggcctgctggcctcccaggccacgaccacacacacaccctctctcctgccacccccaggcctccctccagctcccctagccaggcttccctagctggtgtcccaggagcccggccacttcatctgtgccgctgctgttgcacaagttcctgccccccgtgctcctggtggacacaccctcagcctttgcattccatgttcatctaccccttggtcactccacaactctttgtggccctgccctggggtgggtgctggggggtattgaagaagacagaggctctggggtctcatgaggcttatgatctattctactagagagaagctgaacagttatgcatgttgtatttagtgacaactggtatcagcgctacctcggaaaagaaggctgaatgcaggaagaggatgccaggctggggcactgaggaagaggtggcgtgtggcccgcgggaaggcatgaggggctgtccttctggaacaggaagtagaacattctgaagggcatgtcacacgttcttcaagctcactctgccagccactggagaatggacgtaatggagccaaggatggcaccaggaagtcacgggggcagtgtttgctgctgtccaggtaggagatggtgatgggtgccctgtcccggggggaagttgtggaggctgatccaagtgcacagaacaactctgagctgtaggagaggaagggggcatatccttcagaattctccaggaaacttaacctagaagacatagacagatagagatgtattacaacgaattggcttgcgtgattatggaggcagagaagttccaagatctgtggtcagcaagctggacacccaggagagctaagggtacagttcccatctgagttcaaaggcctgagaaccaggagagcccagagtgtaggttccagtccaaaagctgcaggctcaagacccaggaaaagctggtgtttcagtcctagtccaaaggcaggaaaaagcccatgagctagctcgaaggccggcaggcaggaggaattctctcttacctgggggagggccagccgtgttctactcagctcgggaccctcagctgatctcatgaggccccccgacactggggaggacaatctactttgcgcactcatcaccttaagtgataaactcatccaaaaacagcctcacagaaatgcccggaatcaggttaggccaagtatctgggcaccccatgccccagtcaagttgccacatagaattattcatggcagggagttatgcaggttctgagaagcagtgtggggaggtgggtgcaggatgtgcagacacacacacaggtgtggagctcagacaagaagaacgagcaggggtacagccagggcagtacaggcatatggaggttattggggccccgggaggctgtggaggccctaaaggaaacaggctggagttcaaggcacatccaggacagagccctgaggacccccaaagaccccactgctggaagtttgagcagatcggaagatgctggaggtaaaagcacctgggaaggggctggcatgggactggcccaggtgggtcagagggaccctgtgcagtggggctctgcacccagtgcacctaccactgacccctcatgcacctgcccattcacccaacagtacaattcgaggagcgagtgagaaaatcctcatctccagctacctgtcaccctacccctagcttccctagtctcatttaaggaaaagcaaaccaatttcctttatagaatgtgcctgtaaggcaacgtgacacacagcttacagcagccaccagcagacttcactcatgccataagtggcgccctctgccacactcttgtcctcagaagcccggagctcaccgcacagggcacctcaagatgggaggggagcgcctgttccaccgacaaagttagatgagtaagacacctactgcaacctcacccctcacacacacactcacgcacacacactcacattcatgctcacacgctcacactcacgctaacactcacactcatgctcacactcacacactcacactcatgctcacactcacgcctgcactcactcatacacactctcactcactctggtgtccacactctcgggctgatgttcaccaacatacacatatgcattcacatgcacacacacacacatacatgaacacctgcacatatacttgcactcacatatgctcacatacactcacacatacacaatcacactcactttcccaatacacacatacacattctcattcattcatgtaccacatgcacacacacacatgcacactcaaatgctcacattcacacacaccacatgcacactctcacacacattcacacacacatgcacacaccacatgcactctcaaattctcacacacattcacacgcacatcacatgcacacacacatgcacaatctcaaacgctcacacacattcacacaccccacatgcactctctcaaactctcacattcacacacacatcacatgcacacacacatgctcacattcacacaccccacatgcacacactcctcacacatccccatgtttccggccacacctgccattccatacccattccctgtggcctgagagcctgtctgcaggagaaggggcctaccccagtgcacagggagtgagggaggctcagaaggccaagccatcagcagaccatttaggggacccttccaaagcagcggctcatcatagaagtggcagtgaaacgcggaataaatggagtgaggaggtgaggcagacagtaaaggaagacacgtttcataggaggctttgctgcctcagggaaacacagcagaaggcaggaccagggtgcagcctgtattagtccattttcatgctgctgacaaagacatacccaagactgggtaatttataaagaaaagaggtttaatggacccacggttccacgtggctggggtggcctcacatcatagcagaaggcaaaagtcacatcttacatggcggcaggcaagaaagagaatgagaaccacccctttttcttgttttttggttttttttttgagacagagtctcgctctatcgcccaggctggagtgcagtgatgcgatttcggctcactgcaaactctgcctcctgggttcacgccattctcctgcctcagccaccagagtagctgggactacaggtgctcgccaacatgcccggctaattttttttttcttttctttttttagtagagacggggtttcaccatgttagccaggatggtctccatctccttacctcgtgacccacccaccttggcctcccaaagtactgggattacaggcgtgagccactgcgcccggcctggtttccccttataaaaccatcagatggcatgagacttattcactgccactagaacagtaagggggaaactgcgcccatgattcaattatctcacactgggtccctcccacaacacatgggaattatgggagtacaattcaagataagatttgggtggggacacagccaaatcatatcacagccctccactgtcaggtgcctggcactgtacagacgtgggaatccaggcaggattctctgcctgaacctctctcatgaagacgagggaacacacagcaggcaaatcccagggacaagccaggtcgtgactttgtgcccctagtgaaagaaggagccgatcatttcattcattgtgaggtggtctatgtgcaaacaacatgtgagcaccatgactggcagtgctttaagacttctataaattaatattcaaaattgaaaataataatcagattagattattttggatttggactttttgaattcatttctctagcattttcatttcacatattttttaaacttttaatattgagagaagtatgagccaattatctttttcaggcaatcacagtattggtgtcgtgtctcagcaggctgggggttggggccctggattcaaagcatccatctgaacatattgtcacccgtgcatcctgagagagacagcttcatggagtggaggtgtgtggcctggaggccccacgtaggccaccaggcatgttttccacgaaaaccgaaacttctgacgggattactaacattgggagatttccgtttcttggacgccagtggaggggctgcaccagccttaaaagaaatcatgtgagcctccacgaatcagcaaacaaaggagaaattaaggttctgcccacttttgtggtttttgcttttctggaaagtttacgttgtgcatccttaagtcattacgtaacactgtattaataagcagttgactcagaactccagagggcttctgagctggtgaagtccattcatgttactaagtctattcttcctcccagaataaaatcttccatcttctctgagttaggccttcctcatcagaaccatttcttttctcattcagctctctgaggttttctacttatcatccaactgtagtatccactgataaattacacggattcacaatccagccacttactttgtttcctcctaacatttggaataagctacttcctgcaccagagcctctgtctgtcatgcctttaccggatcttattttggggggctgaccagttgcctaaacccacatgcaccctctcacctgggttctcaagaacttctattttggacatccaccaaaaaaaaaaaaaaaatcttgttaagtaagatgaacacttacctgatggcagaagcctgttgtgctcatcaaaactttgagataaccagggttcctggaatctaaatcttcctatataaaatagcagagtagctgatcaaataagagtcagacaagtaagggtcaactttggaatcaataaatggggctggacccagtcattcacctacattcaaacagcaaataggctgggtgtggtggctcacatctgtaatcccagcattttgcgaggcagaggcaggcagatcacgaggtcaggagtttgagaccagcccgaccaacatggtgaaaccccatctctactaaaaatacaaaaattagccaggtgtggtggcctgctcctgtaatcccagctactcaggaggctgaggcaggagaatcacttgaacccgggaggcagaggttgcagtgagccaagatcacaccattgcactccagcctgggcaaaagagcgagactccgtctcaaaaaaaaaaaaaaaaaaaacaaccagcaaatacctgtgaacagccacctgggctttgctgaaaggttctcccatttctgatgagggtttgtctctttttaaaatttcatgtacctaaaaagtgaattgatcacaagagattgtatccaaggaaagcccctctcccaggaatgttaaggggagaaataaatttgagcgtagagctgcgggctcctggggaaggaagtgctcagtaagtatagtacaaggcagcatgacactaatatgaggctgaggtgactctgtaaccactggctgactacagtatcaacatccatacaaagacagtagcagattaaaggaggacacacatggcctgccctcaagctcattcacagcccaccaaatcaactctttgttcagcttcttgacttttcacagtctgctggcttcaagatgttttccctggccttcttctaatgcctcttccctaatcccaggtaaaattactgaggggggttactcattcgatatatatgtaagttatttgagaaagtttattaaggcacagtggctcacgcctgtaatcccagcactttgggaggccaaggtgggtgaatcacaaggtcaggagttcaagaccagcctggccaagatggtgaaacaccgtctctactaaaaatacaaaaattagcagggcatggtggtgagcgcctgtaattccagctacttgggaggctgagcagagaatttcttcaacctgggaggtggaggttgcagcgagccaagatcgtgccactgcactccagcctgggtgactgagcgagactccatctcaaaaaaaaaaaaatgctatccacaaagttggataagtacagaaacattgtcccaggaaatgaagccagtgattagggcaggggttggcaagtgttttctgtaagaaccacatagtaaatattttcggcttttactggcccatttggtctttgttgcaactgctcaactctgccatcaaaatgcaggcaacagccgtggataatatgtagtgaatgggcatgagcattgtcttagttaattttctgttgcttaaaacagaatgcctaaaactgggtcatttataaagaaaaggaatttatttcttacagttatggaggctgagaagtctcaggtcaagaggccacatctggtgaagatcctcttgctagccaggactctctacagagtcctgtggtggttggtgcagggcaacctgtggtgagaggactcaagtctcacttcctcttgctacaaagccgccagtttccctgccactgtctcccttcctcttcttacaaaactgccagtttccttgcgatgataaaccaccaatccattaatgcattaatccattaatccatgaatagattaatccattcatgagggcagagttcccatgcccccatcacttcttaaaggccctatctcttaatatagtgacgttagagactaagtttcaacatgagttttggagaggacattcaaaccatagaagtgtgttctaatgaaaccacgtttatggatgctaaaatgtaaacatataattttcatgttccacaaaatattgttcttcttctgatgttttcccacactattaaaatataatactatgactagcttgtgagccacatgaaaagaggcggcaggctagattcgggctgtgggctgcagttcgctggcatctgctctagggccactctctcagtaacaaaaacgtgcattcgcctctaataacacgcatgtacatgtgacactactcaaacagtgagcaagctgagactgaaaaacgtatcagttgacactccagaatgttcttgctgaaatccttcagtggatcatctcataaagtcctgggaatgcacgctgaggcatccaacctagaaaatgagatgagaaactcctgtaagatttgagtgttctgttagcccaccatctccagagattaaataaataataataactatggtgcattcaacatctcaatctgagatgttttagtaaaatgaaggcatgctcgcatgtattcacaaagcctagaggtgagaaatagaaaagatctcagtatttcaaatctgagtagcgctgtgcttgtatcattcagctcaaaatctgcagaagcacttagaccagttaaaactgtgcaatgcggtcaagcgttcaaatattttatctcgatcaagaaggaggatgtgggatgatgtgggatgccctgcatcttcccctcccttttttcctggagggtttgaagccatcccaattcatttttttccaaagtctgacaataactcagtgggtcatcccagccttggaacgagccattcctggatgccatggaaattgtctatgggggatgcctccccagctatcttctgcagcctacatctggaccagtcaataatctgaaccctcagctttctggatgtgaatctttccccagactagctgagaactaggggttactcaagaatgcactaaacaattcttcccccactaccctgtacctccacaatcaaaagtgttaggggccaggcagggtggctcatgcctgtaaccccagcactttgggagacggagacaggtggctcgcttgagcccaggagttcgagatcagtctggacaatatggcgaaaccctgtctctactaaaaatacaaaaaaattagctaggcgtggtggtgggtgcctgtaatcccagctactcaggaggttgaggcaggagaatcacttgaatctgggaggtggaggctgcagtgagcggagatcgcaccactgcactccaactgaggcaacagagcgagattccatctcaaataaatgaagaaataaaatgaaaataaaaaagagtgttaggaataaagcctgtcaaatcatcattactgctcctaagcatctctgggtgcttctgaaattgctgttaggctatttgcaagacactgaacattccagaaagtgtgctagagcattgagaattccctcagggactgtagctgcagaccttgctctcacatgcaaggtgaccacgtggcctgcacgttccaggacagtgcctgctgcaaacagtctacccctttaccttttacataactgtactcaccgatcaggaaaacagaccttggtcagacagaagcgatggtcataatctctctgcagatggacttctaactacatttcttcaaattgcaacaaatgtaaatacaatcagtcatacacactctatgctaccaccttctcccattttagggtgttgaaagcccaaattaatcacggctgggtggggcaactcacacctgtaatcccagcactttgggaggcccaggcgggggtggatcgcttgagtttaggagtttgagaccagcttgggcaacacggcaaggccccatctctacaaaaaaatacaaaaattagccaagcatggtggtgtgctcctgtggttccagctactcaggaggctgagacaggaggattgcttgagcacaggaggtcgaggctgcagtgagctgtgatcacaccactgcactctagcctgggtcatacagtgaaatcccgtctcaaaggaaaaaaaaaaagtcacatgtgaaaacttctggagagtccaaagacaaacaccatagctcatgggccattaagacaatctgtacaaacactcaatgaaccaatatgaagacagaaatcctggtgaattgtatatgtattccagaagattaaaatcaggaaggcaaaggaaaatggagagctggcacttggcacccatgaaagacccactttccctgccctaccaggtggcatttctccttcccaccctcaggatcagcctggcatcagcgattatctcagcccactgaggcctggatgctgctggctgatttttgtctctgcagtcaggagccaaccacaggcctcctgaacctccagcaccctggctcacccaggacaacaacacagatcaactcccaaataaattcctctctgttgtcctgcaatgtgctaattgcccataatgagcacatcataataattaaggatgactacgccaaacctttgactgaggtagcaatccttcacccacaaatggcaaggcctttcctaaatcttaattaaagagcacaccagccacctgagctgaggcagagttctcccactttcgagatggggaaaatggaggctcagggtggcaggtttcttattctattccataaggcacacttgtacattttaattggtttaaattaagtgctatacataacctataaggaggttgttaaataaattgcttagccgttgcaaagaatgataggtagttgtaaaaattcatgttttgaagacatgggaaaatgcttgttatggaattttaagagaaattaagaaagataagtgttgtatttgtaggacggtcttggtcgagtgtgaaaatacccgtgctggtgtgtgtttgtgtgtatcaagagtagatcataatgttaacacgggttcgcagtttcttgggtgattcaagatgaattttcatgttttctatacttttttgtcatttccagattttctacaacaaacatttaatcttttataataagaaaaagatacatgttttaaagatttttaaaggtattttactttttttaaaaaaagatattttaaaagactttcctattctgttttaaatcaggctccttggccctcccttattaactctttaaatgcatgcaggacattcgctcggcagccttcttctcctgggtcacctgtacttgggtttgtggtgaattgtcaagcatgtcagcggggtgggactcctgcttcaggggatgcctccctggaattcactcagagcggttgggaatatccagcaaagtctggggatgcaatgtgtggccaaatcccaggtctccatccagaagcccctgtggcccctgctcagagtccatggagtgacctttgtggccacagctttccaggaaacagacgtgtgtgccgggcacctccttctcagcccacccagctgtctggtggtcagcgagaggagaaaaggcagccccaacatcaaagacatagcaactgcctggtgacttcctccccggccagctggaggtgtcagctcgaggccggactctgtttcctgctgccagggcagctgcttccctcttcccttcaactcagaggtgaaaggttcgcaccatctgcaaacgccaccctccagcatttgactcccacaccctaaacaaaacagcaaccagacatcatgagcccaaactgaaacccaccccccaccccaaggatgggcaatgtggagagacctttgcccaccaacaacattttcccactacaccccaaaaggaagaagccatcctcccttaaacgccttccgatctgaccctggatgctcaggccgcttggctgttcccgggtgcagggtcagggaccctgggaggctccgagttgctcaatgcctctgagcacaggctgactctcttcacagcaatctggggaatttgggctgttctggggtggagctggggacaacggtgtgtgtcgggcaacagcagcggcctcgacttgttctggcttttggctctgcagggaaatccaggcagattgggactgaggaaggctgggtgggtgggcagggctggtggacatggggagcaaggtggtgggccaccccgttgacagacctctccgggagagaagcctgttggagctgggcctgggcgcaaagggggagagagggtgaggcgctctgggagggagccctgaacacaagctgcgggaggggggaagggaggaggaaaggggacgggcctgggtccccctgtggagggctgagctggggacaggcacagagcagaaaggaagccatctaccctttaaaatgccttcaaaaaaataatcccaggactcccttgtaccttccaacttgcctgtcggcatctattcagtgtttttcgtgtggcactcaaagaagagaaacacagtctgtgccacggcgggctggccagctgcggggaaccctcccatttggagggaaaatgaagactgcaggatggtggagagaaacgtgggggcctcctggccagccctcttttccccggctccagaaagcactatgagaattcctcgagccctctcatgtttatagcttctgacccacacctggctggtcttccaggtgggtccagttctttcctctctcctagcacccacccagcccccaacacgcatccccaggatcccccaataccacgcctccaactccgcctctggcgcccttaggttccatgcgagggttcctccggcatgcgccatggaagctgtggctcaggaaagcctcattcacatgcttggcaaccgcacactggaaagcagccagcagccccaggagccacacttcacctgatccatccacaaaatgggctgaacggacccaaggcgagagagccaggtccagccgcccagctggccagacctgtgcactcgctagggcacgatgtcagtcatagcctcgactgttgttaatcccacagacaggtggcttttggtcccaaatttgtgacaggcacgaatcacggagctgggaatccggaagacttggattcccacctcgcttctggctcccgatgctgtggaactataattcagcctccacttcctcatttatcagaagttgttgatgagatgccttggaaattcttgccaactgtaaaatcaaagagatggcaaggacaaaccacgtgccttcagaaagtgcttccccaggcacctgcatgctcactctcttacccatgtctccacccctaatccctccaatgccccaggagggggctgggtgagtgttgggtggcagtgagacccagtcacccagctggtgagcaggtgagccaagaccacacccagggccgccgtcctacctcccagtcaatcatgcatatgggagatagataaagccctaaatgctcatttggagctgcttgagaagagaatataattcatgggccaaagatacagaaatgtctttcccagtgggaggcaagccggtggcacctgctctccagggcctaacaccctcatttccgcctctccggtacctgatgctatcagaggattgactccctctaaaggccaacctgagaccttcactcagctcaaaatgtggttcagggagagaaactaacaaaagggaatgggagtggggggaagaaaaatcatctttttctgccaccaaagaacagctgcaaacatagagaacgtgaagtagccgggaagtcgtcgtggctggtgtgaattcagtcccaggggaatcggccgcactgaagtgctgagcgaacgctgcccagagaaaggcaagcccagcgaaaaggcaggcccctcccaaggtcaaggcttcctcgattcggaggcagccttccatcgcaaactgcacccccgcccacagtgtcaggctgcagcgtcaggaacaaaaccagcagcccagagttgatgaggcgcaggcggtgcccaggcccatgggagggttaattaaggccgccctgagctgcatacctgagtctcaacacttgggctgaactgcagacctgagtgccgaggacatggggccaaaagccgagaaggaatgtgaggctgcccacgcggccatcttggccggcagccacggctgacctggaggggtgaaggcctgggatgccattcctccacagaagactgcattagccagggctggaggaacgccaaggccatgacccacagaagcccatgagaggctgaggcccagcccggcccatcttctcaagcctggcttgacccccacctgtgacatcctgcttggtcccggaatcagtgtgatgtgatcaggaaaggcgaatttctgctgtgtatttgacagaatatcaactcagagtccctggggctgccacaacaaagtaacacaaaccaggaggcttaaaacaacggaaatgtattgtctcacctttctggaggcaagaagtccaaaatcaaggctgctgtccctctgagactccagacagagccccccttgcctcctctagcttccgatggtgaccatcaacccttggcactcctcagctggcagctgcatcgctccactcgctgcctccatcgtcacactccatgtgtgtctatgtctccaaatcacattttcctctacctataaggaccagccatattacaatgggatcccaccctaataacctcctctttacttgatcacaaccacaaagaccctatctcagcatcactccaatctctgccttcattgtcacaatccatgtgtgtctgtgtctccacgtcacattttcctctacttacaagaacaagccatattagattgggatgcaccctaatgaccacctcaacctgcttacatctgcaaagaccctatctccaaataagtgctcgtttccaaacaccaggggttggaacttaaacacatctttttgagggacacaatttgacccacaacagaatcctaacacttgggctgaaaagaaagaaaaacgtcacagctcaaaaatctttataaaataagcattattgtttaaaaatatagagaaatagcctgaagatacatcatctggagctttcatttgttggactattatgcagtcactgaaaactattattcagagacaatgggatgaggtgacaatatatttctaacaatcttaagtgatacctatggtggtgatgatgtgaaaacgtcacatgaataatgaggccagggtggggagatgaaactgctgtgggggagttgggagattatggacaatttttctcattatattttttatcttaaacttctttgtatttaatatttatttatatatttatttttaaattaatattaattaagtgtatatttgtatttaaatatttttaaattaaaaagaaaggggaaaaggtgagcttcagcttacactcagcgactataggatttgggaaggtattaacctctgcactcagttgttttttttgttttcttttgttttgttttgttttgagacagagtctcactctgtcacccaggctggagtgcagcagcatgctctcagctcactgcaacctccttcacctcccggattcaaatgattctcctgcctcagcctcccaagtagctggtgttacaggcatgcaccaccatgcctggctaattttttgtatttttaacagagacagggtgtcaccatgttggccaggctggtcttgaactcctgacctcaggtgatctgcccacctcggcctcccaaagtgctgggattacaggtgtgagccacctgcagccggcctgcacttagttttctaagtgcacattaggcgaaacatacatcccttccacctctgagggcagctggggtactgacacagctgaaatgaatgtgttaggccatttttgcattgccataaagaaatatctgaggctggataactttaaaaaaaaaaaaaaaaagaggtttatttagctcacagttctgcaggctgtacaggaagtgtgatgccagcatctgctcagcttctggggaggcctctgggagctctcactcatggtggaaagcaagggggtggggtacacacatcacactcgagagcaggagcatgagagaaaacgggaggtcccagacacttttgaacaaccagatctcacgtgaaatgagtgagaactcgctcatcaccaagggaatggtgctaagtcattcatgaggatccaccgccatgacccaacacctcccaccaggccccacctccaacatctgggatcgaatttcagcatgagatttggaaggggcgaacatccaaacagtagcaatgtcctaaggatgcaacccccccaccccccggagaactctacggcattctaatgaaacggttcgcccttcatgttattacagagcaaggctgcatttccatcattgtccttttaaatgcttaagtgagcccagttaccaatcaatactactgacaacaggaagaggaaaagaaggaagaatcagcgatacaaagagcacaaagtcaaaatgagtccaaccactggacatgggtgtcactggcagaaacttccagaagcttggttcaacattacctgccacaggctcaaccttaaggctttgagctgatacaagaactccaagaattgtttcctggcacaatttcactcatttgccaagttctacagcgtgggaacctgcaaagcctccccatctcatcaccactacgtgacccattcgttccacactggcctacggggcgtccatccagggaggcgtgtagctgtggccaggatgcagcagaggacatctcggagtccctgccctcatgggctcctgggactgtgaaggggacagtcaacaaacagaagagtgctgggagtgtcaagaggtgatgatcgcccagaggaaaagacaaggtgagaggggagcccagcccagggtcgagttctcgggggcgggacgtttgcacaaagatgctgtgaagtgtggggggagcaagcattcctgtactcaggggacagaatgtctcatccaaaaaggaccagcaggtgcttccaggaacatcaagaagcaggtgtgtctggggcagagcaagtgagcaagagacaggaggaaagaggccagagggaggctggggccagaacagtcagggcctggaagcaaaggtccagactccagattttattcttcgtgagaagggggccgctgcagggctttgagaaggcagtgtcacttttttttttttttaaatagagtcttgctctgtcacccaggctggagtgcagtggcatgatctcagctcactgcaacctctgactcctgggttcaagtgattcccctgcgtcagactcccaagtagctaggaccacagctacatgccaccacgcccagcttatttttgtatttttagagacggggtttcactatgttggccaggctggtttcaaactcctgacttcaggtgatcctccagccttggcttcccaaagggctgggattacatgtgtgagcaaccgaaaccaaccagcagtgtcacctttaaagggatatctctggatgctgtgtagagaacagctggggtatggtacccagagtgaggaaggggccagggcaatagctgtggggttgctgagagggggcagactctggacaattgttgagggatttgcacagagcatgccaggattcaacaagcccagcatgtccacctttggagccaggaccccaggggagccacagcagggccagagcagaggagagagaagacacactgggatccatcagcacctctgcctccatccattgattttctgagactcacactagttcctcttgaggggttgttatgtaaaatacaggatgccccactaaatttgaattgcagatcaacagtggataattttttaggcataagtatttcccatgcaatacatgggatatggttacactgaaaatttgctatgattgatctgcattcaactttaaatagaagttctgttattttgtttgttaaatgggccaagttctatcagaactccccaaaaaaggagactctggaaaatgtattcccagcttgaccaagacagagctcctgtccccaggaactgacaaaaacaaccactaccaacactgagtgcttaccatgcacccagcactgtgcccacatgttcagcacttcatctaattccacagcccagaggattacattttattactactggtttgcagatgagaaaactgaggttcacaaagatacgccaacttaccaaaattacacaggtgggcataataatagctaacacttacacagcacatgtaagctcaggcatggatctaaatggatctcacttaatcctttttcacagctctatgagacaggaactgttattgaacccattttacagataaggaaactaaatcgtattggtgttaagtggcccagtcaggatttgaacccaggcagtgtggctgcagaatctgtgctcttacctagcatcttaaactaccactgaaccacttctgaggccacctccccactcttaatgaaacaacattaatgcacaagaaacactcagagagtcctagtggcaggaatggggcaaactgacaacagaggagatggaaatcattgaggattgggggaacctagggagggttcatggaggaggaggcagacaagtaggatatctgaacagttggaagatgtggcaaaagggaggctgactaaacacccatgttaggaactataaatacatgaagtaaatatcactgattactgagttcttcatataagccaggtgctgtactaagcttagaatttatctccctctagactgggtaatacagtgagactccatctctacaaaaaattgaaaaattagccaggcatggtgctcatgcctgcagtcccagctactcaggaggctgcagtgagaggatcccttgagcccaggaggttgaggctgcagtgagctgtgattgcaccactgctgtccggtttgggtgacagagcaaggcctttgtctcaaagaaaaaaaaatacctctctcagtccttgaagtcatccccaaggcaatatggtccccatcttgcacactagaaaactgggattcagggaggccaagcaacttgcctgaggtcaccccatcaggaacagacagatgcaggattgcaaccaccacggcaacttcaaagccagtgcacctgccatgtttccttccctcttggcatgcctggaaggacttccatccctaaagtcaaaacaggcacttgcagaatggctggattcaacaaggtcatcatggcttctgaaagaaacagagcaaggggatttgctctgagaaatacagcctccatctcagaaccctgcaaagatgccctccctggctgtctgagcagcctttgctgtcaggccctgttggcagaggaaaagtgagccgcctgccctgggtcagggagagctgcagccccctccttgggcagagatttcacccaacagagaaaacctgggtggaaaattgcatccaggaagaatagaggaaagacaaaggaaatggctgccttctcccctgggcacccgcccccacggccaccacctctgttgctcacaactttatccattcctttccttgggaatccacgggtgttccaagagctctttagtgcagtgcttcagagctttgactttagggcaagatttggccactgtgagcaatctgatgactccgtttctgtttctaaaaaccttcaggaggcaaatgcagaaataagtacaaaaaaagtgagcaaacctagagaaaacctgccagcctggaagagagaatggatgtgcctatgggcaaggccatccatacgcatgatgaccaggctaactgtgaatcacagattagaactggggcagctctgggtgttagaatgcaacgtggaagcattaatgaatcccagcattcagctgggattccagaaaaatggagtttggcagatgcagactccttgtctaagacttcttttaggagccctccttgcgttgtggtatcttctatttgctccatcagccctgggctctcagtgattggaggggtctgtgtgagtggttccagaccagctcagtatgttactaggttgtattatcaagtagaagcctgcagcttctgtagcagtctctgtgctttttctcgatagtgagctatgattagggtgagctcagagctgaaagtcaaacagaaatgcagatggaaccaatcagcctcagattccaaagcagctgataaaagcataacataccaaaaagaatgttggtcgcacaggaaggaagccatagccccttgccgtctgcattagggaggattttaactttttgctagttaattttgtaatttttaaaatcttgtataagattgtgcaccatttgaaataagaaaaaaatctttaaaaaaatttttttaaaggagataaagataatgaaagaaaggagccttgaggacagtaattgccaaaccatactgctgagttcaatgcctgggtgacagacattttacctgcaaaacacataaggttttccttcttagtaaactcatgcaggctttactattaaaacacagaagcactatcgcaggaaggacattgacataaagtgctttcagggcccttgaagcacggactttaatcaattttcctgtgtctactgaaggaggcttcagctctttggtttaaaataacccagtggatggcccttaatttcagaaattgttctatgcagtttttttctcagcaggatgcagaaagcaatccccactgtggctgagaggagagcgggcctggtgggctccactcagtggcagccagtggtcacttctggatcggttcctggctggggtccattgtcctgacctgctggtcccacaccccacagaggaaagttgctattaataccctcttcaggtccctgcaggaagctcggccttctccagatgccacttaggagtcaatccttgttccaaagaaagagagcatagaatgcaaacttgtgtcaggttgaagaggctggggacaggggcatcccaggctgctcatccacaggtcatcgtcactcggctcctaaagagtacatcgtcgtggaggaaggacagacagaaaacatgatctgctggctccagacccacacctcgctggcccctctggcctctcccatcactcacctgcagggcaaccgcctccagccctcacctgcattcctgggattcctgcagctacatcctccctggtctcccagctctgctcttttgagcctccacatggggcccagagatattctttcatgaagtgagtcaggtgggaaccacccaaatgtctgtcacctgatgcatggagaaataaattgttgtctgtccacgtgatggactattcctcagccatggcaagggatgaagtgctggcccacactccgacgtggatgaactgaaaacattctgctgagggaaagaaaccatcacaaaaggcttgtaggattccatagatatgaaatacccagaataggcgaatccacagacacagaaagtggttgtcaggggctggggggagggaggacgtggcgtgactgtgcatagactaagagtctctttttggggtgatgaaagtgagcctgttttgggggtgatgaagttctggaattagaaagtggtgatggctgcacaacgttgtgaatctactgaattaaacactttaaaatcactaaaatggtgaattttatcttatgtgccttttataccaacttttattacttttttgagacagagtcttactttgctgcccaggctggagtgcagtggcgtgatcacagctcacggcagcatcaacctccggtgctcaagcgattctcccacctcagccccctgagtagctgggactacacgcgtacgccatcatgcctggctcattattttattctttgtcgagacggggtctctctatgttgcccaggctgctctcaaactcctgtcctcaaacaatcctcccacctcagcctcccaaagtgagattgcaatccaatccaaagttggattgcaagcatgagcgccaatttttttttaaagtaagccagagcatgacaacacctagcataaaaccgaccagaccagaggctcccccacctcaccctaaagcctcaccatgacctacgcgattctcccagtgtgctctcatgcctggccacttccccggcacctcctacctccactgttctgtccccatgctcttcagccatgctggcttccttgctgaaccttgaactgcccaaatacactgctgacttggggtcttggcgtaagccattccgtttgctagaaacatcttccctgggtcttcccactgcttcctcactccatcaggcctcatctcagaagccaccttctctcacacgctgggctaaaatgcctccctcccctggcccactgctctgctgtctggcctccttccttttctcttggcaacacccctcctgaactcatacacttgttcactaatgtatgtggttgtttagagtctgtctcctgcacagcaggtcagctccgcgagagcagggaccaggtctggttttgtccactgcagtatctcagtaaccaggacagttcctggtacacagtgctgaatagatccagtgacatagcatcgtttatgtctaaattattagaaaaccaggccgggtgcagtggctcacacctgtaatcccaacactttgggaggctgaggagggtggatcacctgaggtcaggagttcaagaccagcctggccaacatggtgaaaccccgtctctactaaaaatacaaacattagccaggcatgggggtgggtgcctgtagttccagctacttgggaggctgaggcaggagaatcacttgaactcgggaggcagaggttgcagtgagccaagacagcgccattgcactccagcctgggcgacagagcgagactccgtctcaaaaataacataaaataaaataataaataaattattagaaaaccatatttattttgagtattgatattatcaagtaagatcatttgtaccacctactacaagagactcatagacacaatgttatggggtttaaataaaggaaaagcttttctaccttggcatgaggggggctcagggtagaatggaagccaaggtgtgtggctaggtagtccctgggctggggcaggacacaagaaggaattcattcgctcaggcagcaagggagcgtgatgcttccctgtgcccttgctgaccctcatgatcgtctttaaagctgaccaattatattaggtgacagtggcattttgtattaattaacgcttctttgattgttagtgaggttgactgtttttcacatgtatatattaatcatttctattcattcttatagttatctgtaattgtgttcattgcccatttttccactggatgtttgcagtttgttaatttgttgaaagtgttccttattaagacactgatgcttacacacacatttatatacacgtgatacaaatatatagcatatatagcaaattgaaatttctggtttattatttaccttttcattttaacatcatctttagatatgtagtcaaattctttttttatgctgttctttttgcttctatatctagaaatgtcttaactctaaaaatagatcagtatttatcttttttgtaactgtttttataatgcaagagtatagaagatgacacttttacttataagtaataacttttatacttgtggaattaattttgttacatagaagaaccatatgtaccaagaatcttttaaaaatttcccactgttaacccagcaattccatttctgcaaccctctacgaagacctgtttctcacccaggcacccccgaggcataacatgagaagtagcagatgagatctgaggcctcagggtccccagggctcatctccctggacatccattgtactgaaagcctttgcaggtagggctaaattaatgactcatttcacggattagtaattgaagacattattttaacattaaaacaaatcagatcactttcaagaagaaagcaacattctcctgaaattctaagaaaaaggtgaaaacctcaaagcttctctttgggggatacactttggcaagatgttggagaatcactatccacaccaacagatctgagatatgcgccgagatttatttacaatgttcactgcagcataattgtgcaaaaaaatggacacaatctaaatatccaacagtagcaaattggctcaatcaattatgatatgatctcatatgatgaacggggtccattgaaactgtttccatgaaaataattttagttgcaatcacttttttcaacatctaatgtaatcatgagaacatattagaaaaagtatcgagcaggcagtcagctaaaaggttcccagtggcagaacagctgaaggcggttcttttctccttgatacttttctgaactttcatttgctccacagtgactttatgattttctactcagaagaagaaagtgtggggtttgtggctgctgtttggtttggcagctcgctttgtttttgaaagagaagtggagcggagggagcagcgctgttcgtgtagagggccttggggagacgcctgggaacggggccccttcatgccttgtctgcatgttaggaatagagacgtgaatatttttacatcagttttaacacctttgcaggcctgtaggttggaaatagctggtcaatgtctggtgcgtcccagcatgggaggcgcgtccctctccagccccatgcgacattctcggggttgacttggggtcacagttgtctgctcccagtgtttgatcagcttcatttccaaaatgggtcactcacagggcggtgtgtgatcatgtgtgcgacgtggctcttcaaagctgtttcctggttgggaaatcttcacacacacacaaaggtcgagtctgctgtctgtccagcgttgacggtgcctgccacacctcacgtctgcaccctctcctgtccccgcctccgggccttctgcccatagccaggtgtgacagccagggctgctgcctcccgatcaggcagtgcacagccctgggacccccagggacacagacctaagggaaagtgagcccccaaacctgccttccagccagcctgcttggaggaaatgccctagctttattgaacacttaattacttaataaatattagatgataccattctccacaaaaaaaaaaaaaaaaaaaaaagattgaaacccagagagagatgggcaagtcacgaaaacaagaataaaggggattattcttcaaggtaacaggatatgaagagaagtgcccccaggctggtccgctggagcatttaggacagcagaagagaggcctctttataatctcccgaccggaaattcaccctcatcgctcccagcttcacatacaacctggaactccgggggagatggggaaagccggggggcggcccctgtgacctggctgacccaggtctcatgacagaatgtgaaagactcctttatttgtaattctcagtactcccaagttgtaagccccgattttacctacaggtaccttttgagtatttaaagatgtgccaagcacacagtagagaagtatcataggtggagcccagggcaatgagctcaggcctgagtaaatcagcaccatctcccaccagctgtgtgacctcaggtaggagattcaacctctctgtgcttcagactacacagctcccaaacagacagaattgccaacctgccccacagctattgtcagggttaaatgagggtacatccatgaagtgctcagagtggggcgcatcctgagtgtcacaaaggttggcagctgttattgtcttgttttgatggttgggtcatcgtcatcatcatcatcatgatgattagtatccccatttcgcagcagtgaaaacaaaggctcaggtcagtctgattccagggctccttctttctcatctccactttgcctccaccaataacacccagtgggggccccagtatgaaattgtctaactccttaccttcttcactatcttttttctttttctgtctcctttccccactctctttcccatctgtaagccaaaaaccccaacatctaggaaaagccaatcatgaaaaaagtcatcctcccaccaatttgtgcctccagcccagacctctctcccaagttcccaacttacatgtccaacagccaactccacacctcagcctcagcatctcacactcccttcgcccaagactaaactcctgctcttcatacacaacttgctgcctgcaaagacctccccatccccagtgacgccatccttttggctgctccagccaagagccctggagtccctgtccattctcctcttgctctcactccctccttcccctcttccaattggtcaggaagtcctgctggcccttccttcaaagtaaacccaggagccaaccacttattatcctcccgctctgctcgctcctggattcctgaaccaacttcctggcagtctcctaaggtcaagtggcatctgtcttctactcagcctcctgtgtggcccccatatcactcagcgctaactgcaggggcctcatcgtggtctccacaaccctgtgtgatgcctcgcccacatcttccctcttccatccatgcctcctgtccccaccgtagtggcctcattgccccagctcaggggctttgtcccagctgctcctttgccctggaacccacctattgcagggagctgtttggcttcccagcacctcctctaagctcatatcccaccttcttttccctccggggcctaccctgaccacctgcagtgggttgaatcacatcctccccaacattcatgtccatggggagcctgtcattgtgactttatttggaaatagggtctttgcagatgtaattaagttaaagattttgcaatgagatatcctagttttagggtgagcctaaatccaatgatcggtgttcttataaaaagaggataatacacacagagatacagagacaaggccatgtgaagatggggacagagactggggtaatggggccacaagccagggaagcctggaaccactagaaggtggaggaggtagggaaggatcttccctagagcctgcagagggaatgcagccctgccagcaactcgattttcgatttccggcctccagaagtgtgacaggataaatttctgttgttttaagtcacacagtttatggtgctttatcagggcagccctaggacccaagtccactgtcctattgaacatcgaagcctgtcccacccctcgatccccatagccccatgtcttcctgccagtctctgccacttctttgtcctcgtgcagttaccactgctggcacgtgctgtcatttctgcccaactgtgcttatttttatcagccgtctccccacactgggaccaaagggctatgagagaaacttctttgtcttgatgagcctggcagttcacagggctgaatcaatatctgttcaatcaataatggaataataaacaaactcctaaggaattggaaaggaccagaaaaccctttcagaatctacatgaactctccatcttcctcctcagccaccttcatttaacttcatcaaactgacagccagctttgaaaactaatgctttctagtttttgttctattgagtttagtgacaagcatcgcaatagtgattgtatctactatacttccctgcacattccctgtgtggctggtagaatcaatcagctcttctacagcaagatggaagagtacttgtcactaaacccaggaagcagaggttgcagtgagctgagatcatgccactgcactccagcctgggtgacagagcaagactccatctcaaaaaaagaaaagaaaagaaacactgcagagagctgctggtggaaagcgtccctcgtcacgccccctcccaggctccccattgcgtgggatctagtgtggtgcactgtgccccacccagcacaggcaaagaagagaaactgatcttaccagccactcagggtcctttcacaaccacacacctcaaagaaggataaagccatccatgagtaaccccaagtcaccataagaggtgcccttacttcagagctaacctagcctctgggagccaaaaagagcaaagaaagccccaagacacggatctcagccctttgtcactggatggtgtcctcccagcctgctcactcctatggggcagggggccagaagcaggggacagcttccctctaagatctgcacaaagaacactaggagggcatttgggcagtgagttgtcacctacagatcagaggttgaacgagctcactgggacctcccttggctccagttcactaaggaacatgaaatgctttagggagcatggagtacatatgctgggaagaaaagatccccagcaaagcaaggagagccagtgccaacatcgaatggtgaccggaaaggctaacatccatttatccagcaagtcaggccgcctcggagtcctctgcctgccccaggccgctattcccaggccaacccagggcctctccttctggtgcaggggttctcaagatggcgccccctcctggttctaggtgggcaagggtcaggccctcctacctgggtccctcagtcctgtccacgttccagggtctcaacctcagccaggggcctggaggggcctcttgaggacactcatctgtaccctggtctcctctctagctgccccactttcagcctacaggttgactcactgggaaatgattcctacgtcatttcctgcatcctctctgctttatggagaatctgtgatgtctgaacaggaggcctggccctggggcctgtctctgacaacatcccgactcctctgaaaggtgcaaatgacacgtccttctctgcagaacttctgtcttggctgggctgtggtagccaaagcccctgggcttcacgttcttctagagaagtgcctgccatgcccagcctagaaggctggctcccaacgctaaaaggaagcttttctctcttaagaacccagctttgtaaataaaagcctcctgtgtcgttattattgttcttttaggtaatttttttcaagttggcattttgaaataatttcaaatttactgaagagttgcaaaaataatacagaaatgtcctatataaactttgcctacctccaccgatgtcttaaaattattaacagcattgttaacacaatcatcccgtcttagcctcagtttcactttctgaggtttcagttacccgccatcaactgttgtccaaaaatattaagatattttgagagagacagagggagagagagatcatatttacataacctttagtacagtacatagaaatcatatttacataatcttcagtacagtatattgttataatttttctatttcattatttattattgttatcgatctcttactgtgcctaatttacaaatgaaactttatcataggtatgtgcatataggaaaaaaacatacaatgtgtagggtccagtactctccgaggtctcaggcagcccccgggagtcttggaacagatctccatggataaagagggctgccatatttgaggaaaggaaaatgcatgaagtaacatttccaacttttgtctcgtcaactaaactgaaactttgacacacgtctatgtaatagaatgagaaacatgtgcttctgaaacattttgaaagtgatgcttttctgtcagtactcaacccttttctttcaagactctcatgcttgagatatctacaaagcccatatacattcctcacctgcatttaaaaagccgctactgtccattcctcaccctttgttgcttgagagcttccccagagatgtaagccaaccatgctacccctcagaagctaaacagcacctccttcttgtaggagctcctttaggggtgactcgggctccaacctaatggatttgcacactcaggcactctctcggggcatgttcacagcacatgaaacctgtccaaagacaactattaaaattctaaaattccaccctctgtccaacaagtttctgaacacttggtctctatgcctccctgctaaaaaccaagctaaagagatgaaccatggatcaatagaggtttgctttgctgagccaactagtgaggacttgggttggtgcctttctgcatttatcatggttacatggtcattaagggtgacatttgttaaaactgaaaagtcattaaccccaggggcaggactgcccccggttcacagtggggctattccctgtctagaaaaatgaaggggttttagttaaaaggatttgagctgcttgccatctggattttattttgcttttctattatttttaagcagatttaatgtttgaatgggtaatgcatctacatgatatcaaaaagtttaagaaggtgtatatatgagcagttccttccctttcctctctcacagtcacgttattcccaccatggcctatgagtttccattcttaatagacggttttatagtcttcaaaggttactacacgaatacaagcaaaggtatactcctgcccccaccacaaagactggcactctacaaaacttgctctgtgccttcatttttgatttaacactacttcttggaaatttttccccaatggtacaagaaaacacatttttgtttgtttcagccctattgtattccatttatatagacaacatacttaactagtcttctcttaggggacaattacatggttgccaacactgcaattataaaacgacacaaatctatgtgtcagatggtatctgttcactagcgactaggatggtgccagaggagggcacggaaatggtaaacaaatcacatgtggggggaccctcaaaggctgtgtctcagttgtgaaaaacagattttcatcaggcagtacacatctatactccattttacactttagatggagctaaagatgtttccctctccacctgagttctgccagaaatgtgtctgagaatttgcccccagtctaaggacatgaaaccccttgttcccaatatacaagcatggaggggcaccacagattaaagtaagatcaatgttaccagaacaataaaagggctcgctagcacctttaaatttccactaatactttattatttttactccaaaccctttgttacgttaagagacagcaaattccaaagaacaaactaattttagccagagagagcacaagcaacatgcctatccgggaggaagtgctcaggaaatgatagcttcagataatacaccacccatatcctacttcctatagtcagaaaaaaagagcactaaaaagtccctcaaaacacacaaagaaacactaaaaggaaagtccaatgcctgcagcccacctcagtttccttcagtccccaatttctaggttaatgctccaagatcacagccagacttcaggcccaggcctcaccatagcactagatgttgcttctagaatcaagcactgagtggcttctagaactgaggcactacatcaaaccttcagaaaggccaacgcccgtggttctcaaagtgtggtcaggccagggacccctgggagtccccagaccctttcagggtccccataaggtcaaatgatttttataatcatactaagatgtcatctaccctttccacccttactctgtaagtgtgcagtggagttttccagaagttttgtgatgtgtggtagtgcaacagattgagtacagagtcagataggagaatctagccatcttccagctgttaaagagacttgaaaaaatgtaaaatcatactgctcttcttattagaccattttgcccttaaaaatttagggttttttaaataaaaatgttatttatatcaacatgtaataagtttattatgttaaatgaataaatgtttttaaatgtcttaattccactttctaatatggtaaaaaaaaaaatgctcagcttaccataatacacacacacaaaaaaaagctctttgctgtcttcaataatttttgaaaatgtaaaggggtcccaaaaacaaaaagttgagaaccactgcctctacaagaaatgaaggtatgccgatgatcagctcattaccatgaagtgctagggggtcagtgagcctgctttctcaggtcactcttcccttcttcattttcctagcacacagcacagtgcctgcccggggtgggtgtcccatgcatgacagaggaaaggagggacagcataaggaaagcaggaagacctttccattgattattattgaataacacaactaagtcaaatctagaaaaactctctgaaagtaaatggcaagttattctgggtgccctgcttaccagtgaggaaaacagacaaatggaaagaggtgtggggatagatggggaagaggagggacgggtgcatgtgaatggaatgttcaccaccagcagggattgcccagcacatctggcccacccctcttcccattcactgctctacaaagagcttccccacatcacccaccactacccccagcagtgggcacccaagtgtgtgcagcttcccgggaccacccttcacaccacacacacacatcctcacccatgtcccaagcattgaatccctgcccagcagcaccacagctgcagaacggagcatctgtgccaacttggattaagtgtccccatgtgctctcagccttctgccccatctgcacctccaaagcaaggccggagggctgctctatccactcacccaccaatgctgagtatagatggctttcttgtgtggcctaatggatttgaagtgatatcttcttcttgtctttgcccctctctcattcctaatgagagtctcctcatatgcttgggtatttggggaaggttacctctcttgtaaattaccgtttctatcgttcacccattttcccattagaattcctgctttcttttatcaatgtgtaggtatttctcagatattcttgatttattttagttatggacataaccttctgcaagctgacaccctctccaaatccaccatctttccctaactttgtcttatggacaacaacattttaacattttttaataatatcttttgcatttttgttcactaatcctttcccattcctaggaccaaagatatgattctacattttttcctactgaatttatgattttacctttcacttttaggtctttagtccagctggagtcaaagtttctaatgaagcattttttaattacaagacaaacagggcagtagccaattataaaatctaggcatttcctcagcagtcatgacatgcagagggtcatggttttgagcctgtacctctggggattgctctgcaggtgtaatggctaccttcatatgtcaacttgcctgggccatgaggagcccagatatttggttaaacatgattctggctgtgtctatgacgatgttttgaaagagatgaacgttggattcagtagactgagtaaagcaaccagctcccttatgccagtgggcctcatccaatcagccaaagccctgcatagaacagaaaggctgactttccaagaataaggaggaactcttctctgcctggctgtcttcaagctagagcaccagttttttccagccttcagactcaggctggaaccacatcctttgttctcctgggtctccagcttgcctgctgcaaacctccatgaccacatgagccaactccttataataaatataaatctcttcatttaaggagcatatgagatatatgtatacacacacacaagcacgtacacacacacacacacacacacacacaatctgtcctgtttccctggagatccctaatacagtggatatattcaaaattcaagtggctgatggcactagtgatgatgatatttgcaattctggctggtggcaccagagaggaaactttaacagagctgttccattcagaccacctggaagaacattgttgtcttatcatgaacagccccactgaacaccaccatctttgggctcattttggtccatagtttccaataaaaatgaatgcaggttcatatgtgttaggaatgggtgtcacctgggaagtgtgtgaaacacatccatgtttcaataaccggagcctgcagtcactaggacctgggtgagcattctgcacacttcatcctgtggtctcactggtggcctaagttcccattcaagcctcaatggagacactccaggaaatgctgagacatgaccagtgaacacagagggacacatcacacctggagaagcctcccgaaggtcattggctgaatttccttccagcaccagcttcaaaaagcgattcttgtgtgactttgagcccaggctttgctggggaacatggtggcaacttgacttctttaaatccaactgaggcaaagtcagacccactgtcagagactctcactatcaaagctgtagccagatgtcaggtggagttcccccttcccctcaggcctagaggaagtgggcctaaacccccagctccatgtggactgtggcaataccaggccctgtccatcatctccgatggttcctaaggttacagcctcagagtcccagtgcctggacacgtactcctgtatgcactgtctctgtctccatctgtgttgacctggctggaacacacaacctatatatatatatataactacatacaactatatatataactatatatataacaatatatgcataactatatctataaaatatatataatggaatattattcagccctaaaaaagaatgagatcttacaatttgccacaacatggatgagcctgataagccagatacagagagaatattgcacgaacttacttatacgtggaactcaaaaaaatcaaatatatatatatatatatatatatatataatgtttatttatcccttcatccattgataaacacttgggttgtttctgtatcttagctactgtgaatattattcccaatggcatcttttctcctaaggatactaatcctataagattagggtctcacacttaagaccttgtttaactgtaagtacctctttagaggctccaaatatagccacagtggttgttgggggtttaacaaatgcatttgtgacacacaaacattcagcccacaacatggtcttttaccacttcatgctacctctctgcaccaatatatcaacatgcaaaagtgacattaatattttaggtattttcagtcacaacatcctaaactgagactcaggtcttcactgacctaaacagtttttcatttaaacttcttttgtttaactttttcttatttatgaaggagagacattggaaacactcagatgcaggaatccaagttaggaagatagagccaattgtttgcttgatgatttccaagaattctttgtacctttgagcctctctttcaattctctaacaggtttagatattacaaatattttctcccagtctgacacttgcctcttcactttatcgaaggttccctatcttggacagaaactcttcattttaatgtgatcgataggatactgacgtgatcaggacagatacatttggaaggacaaagaacaacttgcaattttcctttgataggctaacccccacagtgccagccatgcccagtaaatctattccacattcagaacactgtagacttaaaatattcccaaaagaatattgagacttcaaatcaatgaaagataggaacaagaggaaaataagacttgctcccagctgtgaaagacataatcttctaatatactggttctcttgcaaagcagaaatcatttttctcagttcatcggagtcataggtgttctcaccacaggagaaaatttgaaatgcaaggggtgggacttcacatggccaagtgatttcatgcaaaagctcctgggattcacagataggcagggcctgatttttttttttttttttttaattttagatggagtctcaccctgtcacctaggctggagtgcaatggcgtgatcttggctcactgcaacctctgcctcccaggttcaaacgattctcctgcctcagcctcccaagcagctgggattacaggtgcccaccaccacgcccagctattctttgtagttttagtagagtcggggtttcaccatgttggccaggctggtctcaaactcctggcctcgtgattcacccacctcagcctcccaaagggcctgatttttacatacggttggagaggaacccaagaagcagcaccgacatgactggtgcactcagttctatgcagagcatggagccacacacaaaggtgaacaagacccagcctgcctaagagggtccctgggtctcagggggaaggcaggcgggcaaacgagtaaatgaaacatagcagacttcaccctggagaaacaaggggccatgagaacgtgccaaaggcagcagctcccagtcaagagacccaaagatgctttcagagggaagggaaatctgagctaggttttgaaaaatgaaagacaacaaagaagagtagtcccacctgtgggccttggaacagacggacacagtgcaatccagcttccagaactttccatgtgtggggtgaggaagtgaggaagtcgtgcctcacagtgtcttttttttaatattttcaagttttttttctactttttattttaccttttttattgtggtaaattatacttaacgtaaaatttatatcttaagcgttttaagtgcacagttcagcagcattaaacacattcaggctgttgggcagccatcaccaccatccatccacagaactttttcatcaccccaaactgaaacttgtatccattaatcattcccctttccctcccagcccctggcacccaccattctactttctatctctatggatttgactgttccaggaacctcatacaagtggaatcatatatatggttttctgtgattggtttatttcacttatcataatgtcctcaaggttcatgcatgttgcagcatgtgtcagcatttccttctttttcaaggctgaataatattattacgtggatggaccacatcttgcttctccattcatctgtcaaaggacacttgggttgcttccacctctcggcttctgtgaatgacgtgtctgtacacggcagtggacccaggcctgcccatgtccccgccactcctcatagcacctacccctgacctcggcgccgggggtctcccctgcatttgtgtggtgtctctgatcatgctggttcctagacattcacccttcagtcccagtggtagcaatgctgactttgtgcctcttccgcagcccctctgtactcatctgaggaggtgactattccaggaaatgctccagaacaattctctgcagaatgccccaggccctggcagctggaaaggacatctgagtcttctcttcctgagcaagcatgcatttcaaggagggaaggtcagatgacacagtaccaacccaccttctgaatgtcccagagaagccattgccaggcaatatttttaggacctccatgagcagagaacagcattttttcctggaggttattagcaggctcagtgcaatgcaaacatcagataacagcattgcactctataaagtgtgtgtgtgtgtgtgtgtgtgtgtgtgtgtgtgtgtgtatacatgtgatgcagactggcacccaacagcaaaagacctccatgtagcctgggccaccaggccacaagaatgactctctagggatcatatgtcccaagagcaagctcaatgctcctctaactggacaattcccacccacccctgggatgagccagcatgactgtgccattgatacctggagcaggaattcaacctgaagatctaggggtaggggcgggattccgatggagggaagaagagtgaagtgtttaattggtgatcaatatatgcatatcaagaacaaacaactacagtatgaggtggaatacaaaaattctcacgaatttgtgcagaacatgagaaagcatctatctgtttaaacagcctccaaggacagtgccatattggtaccagaaagaaggaacggtcctgctcctttattccttcctctcctggcccctcccctccctggagacaggtagggggaggggagaggaggaaggagcttatattagtctgttttcatggtggtaatataagacatacctgagactgggtaatttataaaagaaagaagtttaatggactcacagttccacatggcttggaaggtctcaaaatcatggcggaaggcaaaggagaagcaaaggtatgtcttacatacgtctcatgagacatattcactatcacaacaatagcacgggaaagacctgcccccatgattcaattacctcccatcaggtccctcccacagcacgcagtaattatgggagctacaattcaagatgagatttgggtggggacacagccaaaccttatcagagctatcctaagtaaaaagacaagaaccaaccccccattcccaaggcatattttctgtctgcagctggccctggaagaaaagaatcttctattttgagtgaggtgaggagttttcatgagtagatgaggctggacatactaattactgagcagagagagactttatggagaatgaaatgcccagagaatttttgatgatgagaaagtcaccagaggaacaaaggaatctgccttgatttcaatcaaggcgtcatggaagaggagctcatctcatgggaacaacatgcagaaaagaatccagttgtttccctgtagcctataagtcctgtcattcactgttctgggaaaaccctccctggcctgcaggctggttgacgagttgtttggaggttaccagggaaacgcctcaaggtggggctttcagagaacaggagccacaatagggcctccgagctcaggagccacagccgtgatacagcctctgatagtaaattccctacagggataaaaagataggagccctggaggggatgattcttaaagtcattctcacatgcagtcgacatgcatgaggttgcctgataaaatacaggacacccagttaaagctgaattacagataaacaatgactaattttttagtataagtacatcccaaatattgcaagaaatgtatctgaaatatattgcaaaaaataaaaaattagcactggttatctgaaatttaatttaacaagtcatcctatatttttacagttttactgagttataatttacatactattcaaccctaccatttaaagcgtacaattcaatgctttttaatatattcacgaggttgtgcaaccatcgccacaatcaattttagaacattttcatcagccccaaaggaatccacatccattagtcacacccactccctatgccagccccagccccaggccctgacatccactaatctactttctgtctctagagatcggcctattctggacattttgtataaatgaaagcacacaacatgtggtcttcaggagtggcttctttgatttagcatgttttttcaaggttcatccatgttgtaatatgtatcagtacttcattcctttttattgctaaataatattccactgtatggatacaacagattttatttatccaatcatcagttgatgcacatttgggttgcctccacttttttggctattataataaaactgctgtaaacacttgtgtttaagttttttgtaaacatatgttttcatttctcttgcatatatatatataggaatacaatttccgggtcacatggaaactctatgtttaacattttgagaaatttctaaactgtttcccatagcagctgcactttttaaaaatatatatatatgcggccaggcgcggtggctcacgcctataatcccagcaccttgggaggccaaggcaggcggatcacgaggtcaggagattgagtccatcctggctaacactgtgaaaccccgtctctactaaaatataaaaaaaattagccgggcatggtggtgggtgcctgtagtcccagctacttgggaagctgaagcaggagaatggcgtgaacccaggaggcagagcttgcactccagcctgggtgacagagcgagactccatctcaaatatatatatatatatacacacacacacacacacacacacacacacacattctcactagcaacatccaagggttccaatttcttcacatcctcactacatttattagtttctggttttttcatgatagacatcctggtggtgtgaagtggtatctcattgtgattttgatttacatttttctaatggctaatgaacatcttttcatgtgcttattggtcatttatgtatcttctttttcttttctttttttttttaatttgagacatagtcttgctctgtcacccgggctggagtgcggcgtcacgatctcagctcactgcaacctccgcctcccaggttcaagcaattctcctgcctcagcctcctgagtaactgggattacaggcacgcaccaccatgcccagctaatttttttgtatttttagtagagatggggttttgccatgttggccagcctgctctccaactcctaacctcaggtgatccacctgccttggcctcccaaagtgctcagattattggcatgagccaccacacctggcctgtgtatcttttttggaaaaaaaaaaaaatcttctcagatccctggcttgtttcttaattgagttgtttatctttctgttattgatttttaagggttctttatatgttctggatactagacctcatcagatatatgacttgcaaatctttcctcccattctgtgggctgtcttctcattttcttgatggtctcctttgaaacccaaaactctttcattttgataaagtccaatttatctatttcttgttgttgttgttgctgttgttgttgttgttgttgttttgagagacagtttcactctgttgcccaggctggagtgcaatagtgcactccagcaacctcagcctcccaggttcaagagattctcctgcctcatcctcccaagtagctgggattacaggcgtgccatcatgcccagctaatttttgtatttttagtagagacagggttttgccatgttggccaggctggtcttgaactcctaacctcaagtgatccacccgcctcggccatccaaagtgctgggattacaggcatgagccaccacacctggccttattgttattgtttgtgcttttggtgtcatagctaagaaggcttttcatgacccgaggttataaagatttactcctatgtcttcttctaagagttttatagttttagctcttacacttaggcctatgatcgattttggtatacggtgtaaggaagaggtccaacttcatgcttttgcatgtgggtgtctggttgtgccagcaccactttttacaggcatctgctaaatctggcaaccctaggcagaggtttagcaactggaacaagtgtagggcctctgtgagcatcagtgggttagagttgatctcttccaggaaaatgttcattctcttctttcctctccacatgaatccacaccctccttcagcccttggccttaaacactaagtggaggctggaaaggagagaccactgggcccagcctctggtggcatgtgatgacagtggtgcaattgttaattttatgatattgacgtggccttcattggaaccagctcttggctagggctcaactatctggactaatcttcactccactttaagtttggagcctaaatcctgcaacagcaactaaaatttatgaatgtttttctttcctggaaccaaggcccctggtccaggtctcctatatctcctccattcccttttaagttgtatccttagccatgatgacaggcatcagaaggcattccctctgttcagggcctctgaaccgagccagtggcagctcttcctgtcccctgccaccttggttcacagaaatcctcttccagtcccctaggccgtcagccaaattgcacagtgaattctgcctgtgagaatttagagaaacacttgttggactgtgttcctacaagcaggtgttgaggctgctcaacagaatgtctgtgaaaagacccagcccccattgcctatgctgtccccttcctggcattgagcctgaaagccaaccgggcaatttactttaaggctcagacttgacatggctcataactttcttctgagcccatgaagttacttccccagacaagctctgtcatctgcgtgagatgacttatccattagcaaggatgaataatgcctaaacacatcactggatcttccccaagccccgctagggtatggagaacaaggaataatcctgcctgcagagctggaatcaggcaatcacccacaatgccttgagtccttgattcatccctgggaatcatggctgaacatgcagcccaggcccatccaaagctcgagggatggggagggacagctacacattccaaagaatttgtgtcaacagaagccttggtgtctcttaatgaccctctgggatgaaggcagaagaagcaaaaatagatcaaccccctccattaaagaatgattatttttttcctaccttcatagtgggaaacataccattgaatttgcactttattaatgaaatgtatcatcaagtttacctttactatgtgtatcagtcaggttctaccagaaaaacagatcaatttcatatatatgtgtgtgtgtatgtattcacacattctgatcatgtatatacacatcatacatatatatacacacatacacacataacacataggtacatacacacataaacacacatacgtacacacaaatatatattactattatgtatataaatatatataaaatatacattatataaatatatattaaatgtgtatatatacacacattctgatcatgtatatacacatcacacacacatacacatatatacatacacacacataaacatacatacaaatacatctattactattatgtatataaaatataatgtatactttataaatatatattaaatgtgtgtgtacatatacacattctgatcatatatatacacatacacatatacacacacatacatacacacacatatacacgaatatatattactattgtttataaatatatattaaatgtgtatatctatggattacttttttatatatgaatatatattactattatgtatatatacaatgtatattttataaatatatattaaatgtgcatgtgtgtgtgtataaaatgtatgtagagacagaggagagagagactgatttcaaggacctggcttacacgattgtgggcccaggccaggcaagtctgaactctgcagggcaggctggcaggctggatactctcgggcagaagctgacactgcagtcagcagatggaatttcttcttccacaaggaaacctcagtttgcctcttaaggcctttccactgattggatgaggcccacccaaattatcaaggataacctcctttacttaaagtcaactgactgcagctgttagccacgtcgacacaatgcctccacagcaatgactagaccagggtttgattaaacaactaggtattgcagcctggccacattgacacacagaaccaaccacggcgccagaaatgcttctctgttgttggataaggtgcacgggtgcaaggtttagatgaagcagctgagacacacacaggatgcggaatccgctaagtgacccaaggtaatgcagacgtgaaaggctgaacttggaagacttgaaggaattatgagccagggccctggaccaaacttgcagagaactcagagctcacccaaaggtcctcaagccagggccaagcatcggctcccacacgccaaatcccacccacttcgggtctcctcttctcactaccctcccagttctgatcacgtctgccacccgcttaaaacttctcaacccaaattcctttgcctgagatgtaagaccactcagactcggtcttggccggctttcccagccccctctgctgctgaggttagcccccttgaccgaggcagttacactgcagagtacatgcagggtcccccacaccccagctctgccacgtcccagctcctttgcacgtgctgtgtgaatttcccctgaacactcttctggttttgatatgggactcatattatcctcaaaacccaccttaatcaccactacacctgagaaatccccacaccctctccacctagaagtcccccacttgggcaggtgaggggcccctcctttgtgctccactagctacatccctccatctgttcatctgttcgacattcctctgttcttaccacagtatgatagaactatgcctttatagtcaataagctaagatcgtaagaaaactaatccttttttatggaatgagagctactatagccagggagtcagcaaactagagcccacaagccaaatctggcccactgcctgtttttttaaataaagttttactggcacacggtcacacccattcacttatatatagttcatagctgttctcaggctagaatggcagaagtgagtacttgcccagatggccagcaaggcctaaaataaccactgtctggctctttatagagaaagtttaccaatccctgctatggactcatcagtgaggtgatagctggaagatgagggtggtgccacttcccagggaagtagatacttgataatgaatgggatttccaccatggtacacagctacttcatgacagttgctcatctagagagggcagaccggcatgcacttgttcaagctgggaatgtcgccctgtcaggaacagcaggaatggcagcatgctctttgggtctggagttcctcacactgagggagttataatagctgtggggtttccaggactgctcgtgaagatttcactaaccctggctttgcccaagaaggagtaagtgcttcatggaaaaggccctggaggcagagtcttggatccgggagcttccaatgtttctatgaatctatgcaaacatggcttaactgctggctcagttcttattgacttgagggcctcaagaaaactccagggaagacgccagtgaattagaggatctttctcaaagactttgagattctcaaaaatctgatgatgaactggaacatgtgaccatttcatggtgctagaggttatggagaaggggagaccatgatttcactcctcaaggaaaaatcagccatggagggtcaaggaagaaagggacaaactccttcttcctctcccatcttcagatacccaggtctctggggtggagatagcaagacctggggttggctatgtctttgtaaccaggggccccatgagtgggactgtcctccccaaagagcctgcaagtgtgcagtgacagtagccagaatccacacaaagacgcattccaatgtcattttccccactggaaggggctctgctttccaggttagtgaattactctcgtaattgcaagtcggaacaagagccccaggggagatcttcgtttggatgccaccgcagcataactgtagctgaatgctgacttgaagttccaactgtgggacagagccacaccggctgtgggcgggtctcagagagctcagccaccccaaaagctgagactggtcagcattcccagctcagacatgcacaggttggtctgccctctctaggtgggcaactggcatgaaatagctgtgtaccatggtggaaactccattcattatcaagtatctacttccctggcacagtcctcatcttccagtctattcagaaaaatttccccaggattccaaattatttgcagaaactgtggccatttatcgcatcaatgccatctgctcccaaggttcacacaacggaatctggcaaaatcacacactgctcaagagtgggaaaaaatattccatcttcctcttccccaagagaaacgagaaatgacacttgttttttccaagacactcactccaaaggagttacaaaggatccagagagatttctcatcaaagggattcaagacaatgacaatttctaacataactgaaatgactgatctgctactcagaaacttcttaattgccttgaccgctctctacccttgcttccagtaatttcgttattattattgtgttggttgtttcggaaaacatctcaatgtgttttcaacagttgtcatggagagctggcatcataaggacttcctggagaaaaatcacctcaaaggctcatgtcctccacacacacccccagcacacatgcaaggattttgcaggagaaacaggaaggaactttgaagacaaaaatattgtgatgtgatctataaattcatttctttcttttggcactcatgtgggtcctcaccatctgccatcacctacaaattattggcttttattacaatgttatgattacacatgacagcaaacacaaaactttaacaaattaacaaagcataattaacacaactgaaacgtgattgagaaacagctgcaaaccaaagctctaaccagtaaggaaaggcaccagagaatgtgtctacatgcaagtgtttagcaatatctttgtattgagactatttgtcagctcagaggcacagctacctgccaatatcaagagacattttctaacatctaagcagttgtagagagaatgattactgaaaaatccacaaaatcacccaacaaggacgtacaaattccataatgttgggcgaaacaaagcattctgcatttttcacaaatagatacctgcataaatcatttaatactgttcctttcaatcatcaggatcatctttgtatttggagtcctgtgaaaagtgtactgcatacaaaagcacatggaacaaaagagcaccaagatgtcacaggtggaagaaaatggaatctgtgctccaagactctgcaatctctattaacagcattactattcaaagtttgtgaaagaaagtgcatgaattccgaaagccatttgttccctctgacatgatggagctttgaggaaagacatctaatagaagagaaaagatcagaagagaaaaatcaaacaattgtgtctgtgaagcatgcctcccttcttagaactttctaacgtttagggcaatacccagactttctttccttgttgtacttccacccatgtccccctctttgggagacaggatcaccggcaggtgctatgcttttctttgggaccccttcagtttcttctctttacttcccatctcacccctgaccattcaggcctattgcctaatcccatttttaatttgctgtcactttttttctcttccttccctttgagatgctgcttggaacatttttccttttcagtattctccttttagaaatttagaacattcgcctttgaagtcttatctgcaatttttttcctcctcattaagttccaagttccactggaaaactaggagagaggaacaagtggcagatgacaagaatattaaaaaggacttagaaacagaaaatgccactctcacaacaaccagaatatagaaaattgagctcatgtaagcttcctagatcttaaccgcactgatgtgaggcaaattgcaaagtcacagaattcctgcaaaggaaagaaaaattctcttctcacaacatagagggggtttggtgttattgagccacggtgcacctgtgtgctaattttaaccgctcctttccctcctgcccccatgcccttagggacatgctgaagactcagtaagatgaaggaggagcccagacactccctcctggctccttttccagcctcacctggaaacctcctcagagactccaatccctgcccatgcccacccgccagacactcctcttccctctgtgctcattctacaaacaaaatgcttcaggagcatggccagcagcactggctagttgccatcaggagggagggctcctggtgagccccctctctccttgccaggtgtattgctttcctgctgctgccataacaagttcccacaaacacagtggcttacaacaacacaaatggattatcttgcagttctggaggccagatatctgcaatgggaaacactgggctaaaattgaggtgtcagcagggctggttccttctggaagtttcaggggggaatctgtttctttaccttgactggttttctagacaaggctgcctgcattccatggctccttcctcctccttcaaagccagcaacagcagaatcatatcaacatgagttggcacatgcaggaatcattttggggtggtaggtgttttcatgcatgcgatggcttccacgtggtagagagagttgacagtagcccttaatttctgatttgggcaactgagatgtgagacaggggatacagggacagaaagggacttgatgagagtaggtcataataatagctagcactggccgggcatggtggctcacgcctgtaatcccaacactttgggaggccgaggtgggtggatcacttgaggtcaggagtttaagaccatcctggccaacacagtgaaaccccatctctactaaaaatacaaaaaattagccgggtgtggtggcaggcacctgtaatcccagctactcaggatgctaaggcaggagaatcgcttgaacccgggaggcagaggttacagtgagccgagatcatgccactgcactccagcctggcaatagagcgagactccatctcaaaaaaaaaaaaaagaaataatagtcataatcataatagctaacatttacctgttcactcattcataaatactgattgagggttctgtgtgccaggctgtatttttccaggcactatgtagacaatagtgaacaagacagatgaaatctctgacctgggagtcttctgccagaatccatgaaactatggcaggcccacttgttagtttgcaagtaaggtaaaatctcagacagctcacaattcttcacaatgctttttaaaactgtgtatcttaaggcctttatacaaacacgttaaatctggtctatggagtctgcctaaacactgggaaagactttaatcacaaaatattaattttacacaccttctcaccgagttgaaaagcaatggaatcccaaggaaacatagtagatgctaacttactatcctctgattccgtggaaagcttatttgccatttctgggatagtttgctatacccattcgcaggttggccaggatgacagggaacaccttgtgttcacatctattcttgtcacctgctgctctgcttcctagacacatggccagaccaaatttcccagtgtcttttgcagatgggtgagggtgtgaccattctggccaatggaataggtgcagaaggaacttatgccccttcctggtctggctcataaaaagcttctgtgtgggccgggcgcggtggctcatgcctgtaatcccagcactttgggaggccgaggcgggcagatcacctgaggtcaggagtttgagacctgcctcaacatggagaaaccctgtctcaactaaaaatacaaaaaaattagctggcgtgctggtgcatgcctgtaatcccagctactcgggaggctgaggcaggaggattgcttgaacctgggaggcggaggttgcggtgagccgagattgcgccattgcactccagcctgggcaacaagagcgaaactccgtctcaaaaaaaaaagcttctgtgtggtctttcatacacgcagtctcctcccacatccaccagctgaatggaggagatgggaaggccctggaaaatggaaccaccgtaaggcaggagcctgggtccctgagtgatgctgtggagtagactttctcccccgcaagtttctgccatcacctggactttacatgagtaagaaagaaactccattgttctgagccactgaaaaattggggttgtgtgttacagaggttagcctatgctgactaactcaaacagtttcagtatgtggacctcaagtttgtctcacacacacatacaaatatatacacatagatcaacgacacagaagccacgcagacagaaacgccaggacacagccaccacctatgaccgtgcttaatcttctctcaattcttgcaagctcctctcatgcactgagaaatgtcccagattcaagcattataattgctgttatttttagcaagttattaaagttatataagttataaagttttataaattatataagtgaccactcttgctcgtggaaaaataccataaaatgatgcatggttgaagaggctcagattatcagcaagacgagaccctggaaatatcaaccctcctcatggatacttggaattcagtgtctgtgaactccgtttcggggacttatgccaaagagagttccttgtcactttccttatggatcaaatgatctccatttgggaagcttcaggaaacacccagctaaggtgagaatgcagccagcttctccgtcccaaaggaagactttgggctgttttggggtttgtttaaaccaggcccctttgtcaaaattctgtgaagcaagacccacctttgtgggtagagaagagtccaacccaatgcatggattttagtcctgcctctgctttctccttttctaacctgttgctattcagggaatctttctaaaactggataaaaatgtaatgcagcaaatgcttatccagtatatgcaacgtgcaaagctccaagttcggcacttagaaagacgctaagatggggagcgacacggcccctgcccatctatctctgtcctaactcccaagggtctctccttctccactcccaacagtgctgggaggtagacaagggttgctgccccatttaatggatgaagaagctgaggcttacagagcacaagttgtctgctgaagatcacaaggatcgatggtggcagagctgaaaccaaactgcagatctgttgggcatccagtccagctccacgctactctcacctcactgcacacacgtggaaactttattgcaaacactccaaattatgttcaattactggaaatatcaaaatttgagacccaaacaaattatatctcaaccaacaacattcaacccaggggaaaggcagttaaagggtattttacacacacacacacacacacacacgtgcacacacatgcatgcacatacatacacacacactcaaatatcaaaatttgagacccacacaaattatatctcaaccaacaacattcaacccaggggaaaggcagttaaagggcattttacacacacacacacacacacacgtgcacacacatgcatgcacacacatacacacacactcaatccctcactccacctctgaatttcctagagcatcattccactctgccctttgcgaggcccatattcgtagcctctcttggtgtggaaccacagggataagtcacaatatgttccctcccggaataaatcacctgtcagctgtcctgcagctagaatttctcggtgacctgtccccagctggtcctgctgtgacagccgcaacttgggattcctattttccctgggagcaggtgacagcttgcaggcttgctgaaagacacccatcccagctttgacggggcatctgcagggccctcaccttcctctgcagggtccccgagcctcctgctcatccatttcccctccagcacccccagagcagcctggagccagcctgcaatgtcagacacaggcagcaggtcactcaggcccatgcacagaacctgctgtcccatctgcctgggctgtccccaaggcacaggggctgcggacacccaccaacaggggggaacccagaggaggggctcatagaagcaggaggacggagcagggctgaccaacaggcacagggacacagcccgtcagcactacctctgctgtctctctcggtggtttctgaaggaccacttactgctcagcccatcttcagcccctctccagatcccaccaacagggtttaagaacctttgctatttctgcaccaacagtttggttttccaaactgggaggcttgtgatcaatgtgccctgattggaaccaccaccgccaccccccaccagctggactgaaaggcacctcactcagaaggagctaaaatccacagcttgcagtgtgacagagctggaggaagatgtaatagaggaatcaacgcattttccaagccatttggggaccgtggtatggttcggcccatagagtctcagtcaccccatggaggagctcatcaatgaggcttcagaacaaggccttagctcactggctgggttcacatgaccccaccatcatcctcagaacaggagcagaggacgagggatggacgagagcagctgggcgtcagtgtgacccgctctgagactccccagacctggcgtctcatttgacctgagggacaagccctctgcccgcctctcacatggccaggccacccccagctctgcgtggacaggctgctgtctacgcttgcagagctgctgtcatctgaaggcatcacccactcctgctagatgggaccggatgagccaccaccaggggacgaacttcctgcatccccatgtgcccctgggcagtttccacactgctggcctccccaggtatgtaactccatgcatgggccgacctcaccttcctaatgagacctggtcccttggggccaggacagtggggccacttcctatagcacagcgctggtcagacaggagagaggtgatgaattcccaggcagtgagccccattctccttcccctcctcacccttcctagagcctggggaagcctgcaggccacggcccccctctgcggggtccccacacatgagtccccatgcctgatcccagacgttctacccacagctgcccacggcaggcatggaggtgaccagcacccaggagctacctggcctgaggcctccaacacacaggctcaccagcacgggggagggctgcagcccagcccagccctgccgctgcaggcagaacatgagacccacaggaaggcaccagctttagggtgagtcaggctgagagtcacacacagtgtgggcagctgaggccatgaggcctcaggccatgtgcagggatcctggatgagcctccactccttcctgcccatacctgagacgaaagatgctcagggtagcagtagtctcgaggcggtaaggcaaaggccagcggggacgcttgtaggcagctaacacagtgagagcagaaacaagcactcagccctccgggagctgccagcttcacgggaacgagatcctctccaggggatctggagcggctgcgtgttccgcacattaatcctctccatgagacctggtcacctttctccccctgagttcctgagcatcgcagctggggaatctgggcagggccccgtcatcgcctaagaaaatcgctgcaccatgacaacctgcagctcgctaaccccattctgcattcatctcagccttcccttactgcctgtgtcttacttaatttgcaaacatcttgcaccctcgctttcaccagatcctggacttagaggcagtgttcttgtccatagaattgtgctccgaggctgcacgcccacctctccaatgctatttcaccttgctccattcactcgcctctccagccccatgtttgtggtgccagcagcagtggggaaggtaggaaggaagctggtgcatggggacaggcagcagggctgctggatggagtgtcccagtgtgccacacagtggcatccagcttccaccctccgagccagtcaaggtcaaccaagagccaccaggtgtcatgtctggagatggagaacaacggtgggagcagcaagagatgtagagggatgcggagccttctcagagaggacacgtctttctcacttctacctcatgacaggtgcccgaaaatattgtacaggtgtattcagaaagagtagagagccacggatgtgagtagtggcggtgagcattaaatgccacacttacctgcagaactaaggatgagtgatggttatgatggagagagtgtggctggcaatggcgttatgctctgagagtgagacacagaacaaccctatcaaatggtggaatgatgggaagtgcatataaagagtagaataaacctcctgattgccttacaggtattaaccaggaataaaaggatgtttttcaaatcagatgctggagaagaggtaggagaaagagaagaagaggttatagctgctttcaatattgctcacaatagggaactgagagaccataggcaaaaagaaaagagagataggatgattattatatacaagtattaatagagaggtaaccaaaaatatacaccttttgtggtagatttaagacagccacataggctggtgtctcacaactgtcatcacagcactttgagaggctgaggtgagaggatcacctgaggtcagaagtttgagaccagcctgggcaacatagtgagacctgtctatacaaaaaacattttaaattaggcagccatgacagtagacactagtagtcccagctactcaggaagctgaggtgggaggatcacataagcccaggagttaagaggctacagtgagctatgattgcaccactgcactccagcctgggtgatttttttttttttttttacagaccctgtctctaaaatatatatatatattctttgctacttctttgctgggtgctgtggctcactcctataatcccagcactttgggaagccaaggcaggaggatcacccaaggctaggagttttgagaccagcctgcacaatgtaccaagatcccatctttgctaaaataaaaaaattaggtaggcatgataggcagctctatagtcccaactactcgggaggctgaggtgtgacaattgtttgagccaaggagttccaggcagtgagctatgccactgcacttcagcctgacctgtctcttaaaaagagaaaagaagaaagaacatggtggaagtgaagtgacattctgagacttgtgaggttaggccattagaactcttgcagtttctgcctggccctgctgaacatgctctctaggagccctgaggccaggtgaggagtccaagcactctgcaggtgctcggcctaagcctcagctaagcctcaccctctggcatccacttcaagtcaccagacatggaagtcaacagccactcaaatactctaaaccaacccattcacagctgaatataattaagtgacttctgttcaggacgcctgaaacagaagaatcaccccgccagtccctgctcaactgcctggctcacaaaatcatctgtcagtatgagttcatgatgcatttgatctcaaaggaaatataaactatctttaagaagatactgtcccctgaaaaggcctagaaatgtatcatcaacccagcagcactgagcactgtcatgctgcactgtggtctctaaataccatttcctaccaaaaagaacggggctgcctgcaggaatggctgattccagatccgaaaatgaaaatacacacaatgaatctaaaattgtgtcatccagaaatcaaagaagctaccaaacattaataggggcatgccaaaagaaatcaggagttcatctgaataaaatcttactcatcaaaaataaaggccaggcatggtgactcacacctgtaatcctagcactttgataggttgaggcgggtggatcacttgaggccaggagttcaagactagcctggccaaaatggtgaaaccccgtttctactaaaaatacaaaaattagctgggcataatggtgcacacctgtaattccagctacttaggaggctgaggcacaagaatggcttgaacctgggaggcagaggttgaaatgagcccagattgtgccactgcactacagcctggatgacagagggagactctgtctcaaaaaaaaaaaagatataatttaagcatcaataaaaataataactacaataggctgaatccataggttcataataatattaaaaagctcactgctcacaactggaagatggtcatgaaccacatcgctactctgaagttgataaagagaaaagataaggcatttactaatctttgccttcacaatacaaactgcaggataacaaaagaattgatgggcgaaaggattccaattagtaaacaaagaagggatgatctaatgtcacattttgaaactcctaatgaattcatggatcaaggcaatggaaaccacaagaaaacctgagagaagctggttttaaatactttctgatagaagagcccagcaacatctatgaagtcatcttaacactcaagaatttaaactcaaatctgatcaaacctctagctccaactactaaagtttaggaaaagcaaggcatagagaaacatgttagacaaaagcatggcactataggaagttacaaggcaaatgcgttgattttttcaattaataaatgaccatacaaccagagagggacttatgaaccaatttaaacaaactaaacttgtttggatcccaattcaaataaatcatccaaaaaaattcttaagacaatttaggaactgtaaacactgactaagtatttgctgatattttaaaagattgtttttatatgagataacagtatagtggttatttgtttttaagttctttgtcttttccttatctttcagatacacactgaaacatttagagataaaattatctgattcttggaaactgcttcaaaacaattgggtaagggcaaagattaaagaggttagaaaaaacaagattggctaaattgataatttttgaggctaggtggtcagtacattcgcttcatgataaatggctctctaacttggtatatgtttttaaattttgcgttaagttttttaaaaaccatgctgacaaataattttcagtaacatagaaaatgcttatgacacaatattacgtgggaaaaggcaggaaaaaatatcaatatagtaagatccaagctatgtaaatcagtatgttcaatgcccaaatgtttgcagtggctattttgggtggtgggcttattatggataaatgtcatcctttacactaattttccaactttcttttaatacaatgggcacatatgacctggcgaattaggaaaaacagatagttattttagtttttaagagtaggtgaactatgagccatttgaaataatactcttgagtcttgagtcttgagtgatgtgtttaggtaacatcctctgagagagagctggcaccaccccagggtgcctcttagcacctaaaagtcacatctggtgtaagatggcaacgtgccactctgtttctgaggcgccgtaaacaaaggattgatacatttatgtttccactcagtatgaccaaaggaatgaaaaaagtgcaataatctcacatatttgactctcggatgtccccaaaggagcgcagcttggtaaatgactatcactaggtaatcactgttctagaaacttctgtgccagagacaacttgggcgttttacagtttttgttctgttgcaagacgtgatccaggggattatgcacactcctctcctgcctttctccacaggaaagcagactgttagtccctcagcagggcagagcatgccaggtcaggggctctctcagcagacatttcctcagaggcccgaagccctagcacctcccataagcagggccttgctttccagtggagtgtttgtgtaaaaggaatttttatgccagtgccctcttaggaatctttctttaaaatcatatgaaagaaatgcagagagagatctgagtaaatcctatacaacccataagcctagaaagttccagaagcattcagaatattaatacagccatcatcaggccttttcctctcccatggagtcattggcaccctgggagatctggctggatagttctgtccataatctcttagatttcttggtggttttgttttattttatttttcctcttcttgatatccctcctgaggatgatttgacctttctggtaaaaatcttaacttgggaatttcttggatttcctgcctggagattatcactccaacatttccatatcgcatctgcacatctgtgtggtttccagcatttgtacttcattccgtcactccccagtggctctcaaatgtcttctccaatctcaacaaactgccctctggggctgtaagctccatttttatcgatgggaaaatagagacaccaagaggacttggcgaggagcgaattcacccttgcctggaccctgctccagccacgctggccggcctcagcgaggggcacccacacacacaggcccagtgctccactcagacacctaaggaggcagaggctccattaacacaccctcatcctcaccaggcttccttctttagccacaggtgtgtctgccgtgactgcatctaccccagcatcagtatgcaaataagccaaaggtgcaatgcatggactgacctccacgtagatttcacaggatggaactgccgtttacaggagtcctgtatatgggaatctaaacttacccatgaaaggcagaaaagcttcgggaaatcactcttcgggaaagtagaagaagaacttagataacccaccacctcccagagtgcacccagatggaatggatgcatccttcctcgggctgaaaggtctgaagagaagctccctagatcagagcctctcaccggattaaaatccagatgcagattcagtaggtctggcacggcctgacattctgcatgttaacagcccctagttgatgcagatgctgctggtccttgcagcccacactttaagtagcaaagatttagagctgagctgcccaatacaatggccactacctactgtggctgttgagcccttgaaatgcagcaagttataattaaaatgtgctgcaagtataaaatacacacaagattctgaaactattccaaacaacagataaagagggactcctccctaactcattttatgaggtcatcatcatcctgataccaaaacctggcagagacacaacaaaaaaaacattttaggccaatatccctgatgaacattgatacaaaaatcctcaataaaatactggcaaaccaaatccagcagcacatcaaaaagcttatccaccaagatcaagtcagcttcatccctgggatgcaaggctggttcaacatacgcaaatcagcaaaggtaatccatcacataaacagaaccaatgacaaaaaccacatgattatctcaatagatgcagaaaaggtctttgataaaattcaacacccttcatgctacaaactctcaataaactaggtattgatggaacgtatctcagaatagtaagagctatttatgacaaacccacagccagtatcatactgaatgggcaaaagctgaaagcattccctttgaaaaccggcacaaaacaaggatgccctctctcaccactcctattcaacaaagtattggaagttctgtccagggcaatcaggcaagagaaagaaataaacgtattcaaattggaagagaggaagtcaaattgtctctgtttgcagatgacatgattgtatatttagaacaccccaccgtctcagcccaaaatctccttaagctgataagcaacttcagcaaagtcttaggatacaacagcaatgtacaaaaatcataagcattcctatacaccaataatagacaaacagagagccaaatcatgagtgaacttccattcataattgctacaaaaaggattaaatacctaggaatacaacttacaagggacgtgaaggatctcttcaaggaaaactacaaaccacttctcaaggaaataagagaggacacaaacaaatggaaaaacattccatgctcatggataggaagaatcgatattgtgaaaatggccatactgcccgaagtaatttatagatttaatgctatccccatcaagctaccaatgactttcttcacagaattagaaaaaactactttaaacttcatatggaaccaaaaaagggtctgtatagccaagacaatcctcagcaaaaagaacaaagctggaggcatcatgctacctaacttcaaactatactacaaggctacagtaaccaaaacagcatggtactggtaccaaaacagatatatagaccaatggaacagaacagaggcctcagaaataatgccacacatctacaaccatctgacctttgacaaacctgacaaaaacaagcaatggggagagggttccctatttaataaatggtgttgggaaaactggctaaccatatgcagaaaactgaaagtggaccccttccttacaccttatacaaaaattaacccaagatggattaaagacttaaatgtaagacctaaaaccataaaaaccctagaagaaaacctaggcaataccattcaggacataggcatgggcaaagacttcatggctaaaacaccaaaagcaatggcaacaaaagccaaaattgacaaatgggatctaattaaactaaagagcttccacacagcaaaagaaactatcagcagagtgaatgggcaacctacagaataggagaaaatttttgcaatctaccatatgacaaagggctaatatccagaatctacaaagaacttaaacaaatttacacgaaacaaacaaccccattgaacagtgggcaaaggatatgaacagacacttctcaaaagaagacatttatgcagccagcaacatgaaaaaaaactcatcatcactggtcattagagaaatgcaaatcaaaaccacaatgagataccatctcacgccagttagaatggccatcattaaaaagtcaggaaacaacagacgctggagaggatgtggagaaataggaatgcttttacgctgttggtgggattgtaaattagttcaaccactgtggaagacagtgtggtgattcctcaaggatctagaaccagaaataccatttgaccctgcaatcccattactgggtatataaccaaaggattataaatcagtatactataaaagacacatgcacatgtatgtttattgcagcactgttcacaatagcaaatactgggaaccaacacaaatgcccatcaatgatagattggataaagaaaatgtagcacatatacaccatggaatactaggcaaccataaaaaacaataagttcatgtcctttgcagggacatggatgaagctggaaaccatcattctcagcaaactaacacaggaacagaaaaccaaacactgcatgttctcactcataagtgggagttgaacaatgagaacacatggacacagggaggggaacatcacacaccagggcctgtctggaggtgggggactaggggagggatagcattaggagaaatacctaatgtagatgatgggttgatgggtgcggcaaaccaccatggcacgtgtatacctatataacaaacctgcacattctgcacaggtatcccagaacttaaagtataatttaaaacacacacacacacaagatttcaaagatagaatgagacaaagaagataaaattgttcactaatcatttttatatcaaatatatgatgagatgatacgaatatattggtttaaattagctatggtatcaaaattaacttcactgtttttttttttactttaaatactgggatacatgtgcagaatgtgcaggtttgttacacaggtatacacgtgccatggtggtttgctgcatctatcagcctatcatctaggttttaagccccgcatgcattaggtatttgtcctaatgctctcccaccccttgccgcccatcccccgacaggtgtatgatgttccctttcctgtgtccatgtgttctcattgttcaactccacttaagagtgagaaaattcagtgtttggttttctgttcctgtgttagtcaaaggacatgaatgaagctggaagttcactatttcttttttattttttaacatgtgactacaagaaaactttccattataaaaacaccccatgtttctattggtcagcactgatctgcaagactctacaagctttaaagctaaaattcttgaaagtgctcttagaaatggttttatatgcttgccttctccttggaaatatacacaatttatcaacctgccaaaaaggtcttatccatccacctcttctcactaggaagtagcaagagaaagggctgatcaaagccagataacctgtcccacataatggccaaggcttcctttgaataatatcatggtggcttttgattttacatagccaattccagataagagaggcccgtccttgttaaaatgactgttaagtccattcaacataatattatctaaagaccgactatcactccaatttctgataaaagcaacaaatgtggttagagtcccaggctgatcttttgcttggttaacacaatccagtccattttttcctaatgatcacttcttttctttcagctgaaatgtctttctcattagcagacatttttgaagtagaggggttgtttgtttaaggcttcaagaccaaggcaaacatttgttataaggctccaaaggaatttgcaaataatttccatccatgatttccaaagccacaggctgcttgtataacatttgtgcaaaatgcgtgggctgctcccatgaagcaagcattgccagaaatgtttactctgcaggagtaaagctgtgtgtttgtcactctgtttgaaaacttccacatggcagctcaatgggtagagtgtggaatagacactccatggatggccacggaactctccatgcctgtgtcctctgatgagctgcccttgcaggatttgacacctcttgattcactgtggctgtcacctctttgaattgtcttcagttaagactgatcacacaaaggccaagtacagaagggttctccagctctctaaatgcaggccatcccatgaagtttaagaatagaaaagccctggacagtcgtgggacaatgttatagcataaattgtgtccccaaaaaagatgtattgaattcctaacccctgatatctcagaatgtgacctaattttggaagtagggtctttacagaggtaatcaagttaaaatgagggtattagagtgggctctaacctagtatgactgatgtccttataaaaggggggaatgacacagacacaaaggaagaactacatgaggagacaccgagaaccatgagaagattggacttaggctgtcacagccaaggaatgactggggctaccagaagctgggagagaggcctggaacagatctctccctacggctctgcagagcttggatttggtcttctctcctccagaacagcaagagaataaatctctcatgttttcagccacccagttggtggcattttattacagtagccccaggactaatacagacttgaattctaacagttcccatgacttttggggttttttttttgccatcattctcacatgccatcccaccttggtcccttagtatgcgtcagtgatctgggggtgaccacgtatagtggcagcatcttaaaaatgcattctataggttgccagatttaacaaatacaaatagaggatgcctagttcaagttgaatttcagataaacaacagataatttttagtataagtatttagtatactatttgtaagtgtttagtataagtatttactataagtaatgtccttcagacatacttatactaaaaagttttctgttgtttatctgaaattcatgttgaaactggatgtcccgtattttatctggcaacctaaataataagcatctttgaaatactctaaactccctggaaaagacatgtgtttggtgccacgaggcgggctgggagaatttccatgaggctgggccaaaacacagggttcattgcttggcatcagctcacttctgcttccacaatgagaagcagaaacttaattcctccaaggaacaattaattggagtagaaagcttgattcttgcatttcccatgtaggtcacaaatttctgttgttgcaatgtacctaatacctatgttgtggttcaaaatgtagcatcatcttaatgcatgcccataactgaattgttccgcctaaaatgagtgtaatcaccctaaccctaaactattcataacagacaggtgagcttcaggggtgcatgacccacacagccacacagggccttgcgctcaggaccccacacttgattcaaaactctgcagtcaccgtattaaaattctcagtaatttttgagcaaggggttctgcatttttattttgcactgggcctcacaaacgatgtcaccggtccgaggacaggtgtacctaataacacgtcagctgctgcacaaaatgcttccatcactgaaaagtgacagatgcctcagcctattctttgctgaactcgcttctaagcaactagagccctttggcctggcacctctcctctgccacgtgctgctgtctccagcattgctttaatttaattagtgtctggctggttgaaaagactgtttttgattctgtgtgtgctgtatgagctgttgtctggattctcttccaacttggccttgggaacacccagtgtcgaatctgctgtctttggctctgtaagactgtggtttttaaaggacaattgttgctcatagcaacttgaaggctggatggagacttgcctgaagccccatgaaccagcagatttggggctatttaatttcccaccagtagctgattccaaaggtgtgcttgtgtggaaccaaatctctctgccatcagccacatttattttctaatcttcattttttttccctcccttctcatgtacagggttcagctttctttctcctcctctaaggttttccttccgaattccccttatccctttccttgtcctctccctgtttgtaacccatccactattccacatgcccctagctgacccattttttgctcaggtctttctccaggggagaagaaccaaaagatgagattcaaattgattttgctgctcattaatgtccctttcaaagttcttgacgagggtgatgaagccaatgcctaggggaagaaatttcaaacattggctttccagttccattccagttccccaccaatgtcttcagtgatgccaccatgcaaagagcatcaggaaaggagcactgaattctggctcaaagtcacttctctgtgactttggctaagacactgaaactctcaagatcttgatttcctcatctacaaaataagagtgctcaattacataataatctcatagaaacctataatttgcacaccaaagttataaccattaattatcccacaaagcacagcaggaattttctaaatctgaggcttgtgatccactgtattagtcagcaattgctgtgataatgctacataacaatcccaactcttgtggcttagaacaacaaacatgtatttcttgtctgatgggccagagatctgatttggtccaaacccatccaaggatgtctctatagccccagcatgctccaaaacacacatgacccttgaagacagggagccctgaccttgttcttggtcctctcattggtgagtccagttggatctgtttgtctcctatcagggaatctaccccgatattcatgtaggttcttttctattttccctaagcattggccagcttgagaaataaagggacagagtacaaaagagagaaattttaaagctgggcacccgggggagacatcacacgttggtaggatctgtgatgccccacaagccacaaaaaccagcaagtttttattagagattttcaaaaggggagggagtgtgtgaataggtgtgggtcacagacatcaagtactttacaaggtaatagaatatcacaaggcaagtggaggcagggcaagatcacaggaccacaggaccgaggtgaaatcaaattgctaatgaagtttcaggcaccattgtcattgataacatctcatcaggagacagggttttgagatcaactggtctgaccaaaatttattaggcaggaatttcctcttcctaataagcctgggagcgctatgggagactggagtctatttcatctctgcagccttgaccataagagatggctatgcccaggggggccagtttagagacctacctgcaggcgcacattctctttctcagggatgttccatgctgagaaaaagaattcagcggtatttctcccatttgcttttgaaagaagagaaatatggctctgttctgctcagctcaccggcagtcagagtttaaggttatctctcttgtttcctaaacattgctgttaccttgttctttttgaaggtgcccagatttcatattgtttaaacacacatgctctacaatttgtgcagttaatgcaattatcacatggtcctgaggtgacatacatcctcctcggctgacaggattaagagactaaagtaaagacaggcacaggaaatcacaagggtattgattggggaagtgataaatgtccatgaaatcttcacaacttatgtttagagactgcagtaaagacaggcataagaaatataaaagtattaatttggggaactaataaatgtccatgaaatcttcacaatccacgttcttctgccatggcttcagccggtccctccgtttggggtccctgacttcccgcaacagtctccttgggattttgatttgtctttgatcaagaagggttaggcttgtgcaaacggtggtatacctacaatctcaattgtcgacgtttgccagacaacggctttgctcggggcctggggcattggccacaaatctgttcaattaataccaattgaccaaataaccaagatgttatattggccaaactaacagactgcagtgttttacaggattgcttaagaactttaacagaaatgttttaacattaacaagaatttggtttcgattaatagatatatagaaacacatattttatcatcagtaactaaaattgtagtatttagcattgaagttgtttatattatgctaacatctaagagaccaaaaaataagctaattgattggcctgatgaatagattttaacccaagacaccatgtacagttgcaaaggctgtgcactataccacctcaagaactctatgtgcatagccatgatgtgagtgtgcctccaaaactgcatagcacagcaaccatggcttcaacaaattcactcctcctcaacctaagacccctgtcttcatattaattgcccatttctctgtgaccatggactttttctctggttccccagagaaaaagagagatgactttttctcattccccaaagccatcaccatcctgtccttttcagaaccccataacaagaccctctttgttaatgcatttccattctgttctctgactcccctgcctgcttacacccaaccccactctgccaagaaatgtatgcacatcctaatgcagacatgttgtgcaaacaagtcttttacctaagaactactgcaggtgcaggaatccagcaccatgaaggttggaatggggaagtttaccagcagcagatggggcatacctgatggagaaattccaaagagggataataagactctgcctgcctccttcatggaaatatactctgaggtggaaatgtacacagtgttcccataaggggcttagaaccatcataaatgcattatgcacagatacagcataaatgtggggatggggggtcacaagtggctggtgcatcaaggactcccaggctgtaggtgacactctgggatgtcatcataccacttagcacccccattattctttttaattaaaatgaaattcacataatataaaattaatcattttaaaaggaacaattcagtggcattcagtatattcacaatgttgtgcaaccaccacctccatctagttccagaacattccagcaccccaaaagaaagtctcatacccattaagcagcgattccccattctccctcccccatctcccaccctgacccttgacaaccactaatctgctttttgtctctttgaatgcccctattctgggcattttatataaatggaatcgtacaacatgtgaccttttgtatctgccttcttcgacttagcataatattttcgagattcatccaggttgtaacgcgtgtcagtcctccattcttttttatggctgaataatggtccaatatatgaaaagactacattttgtttaaccatgcctccaataacggacatctgagttgcttccactttttagctatcgtgaataatgctgctacaaacatttgtgtggaactatttcttgagtgctgttttcagctctcttggatatatacccaggaatggaattgcatcttcatcatgatatcctctcatttttccagcctttattctgaatctttttagaggtcaaggaaagcaaacttttcctgtaaataagcagatagtaaatattttaggctttgcaagccaggtggtctctgatgcaactactcaactctgcctttgtagcatgaagcaaccacagacaatccataaaaagtttattgttcttcaataaaatttattcacaaaaacagacaaagggccagatttggccctcaggccgtggtttgccaaccccagctctaggacaagcccaagtggatgcagcctcttccaagtgccccgtttcacaggagaggcacctcctccaacctagctttctattgccagtgaggatgagcaagggagacggacttagcctgtggcagaagagttgaggaactgcctttaaaactgattatgaaatatgtgaaatcttgggatgtgcttctgctatgaagagcagcattgtgctctctgttgatgtttaagagttaggctaccatctttcaggtggtttttgagaataaaagtttgatgagtaccttgaccaatctcttggtgtcctttcaaacattcaccctttctgagatttatcaggggagaaagggtcgctcatgctcaaaagctcattcacccaacaagcatttactgagcctttactgtgtgcaggcactatactaaatccttggtatttaaaatgatgcattcctggaggttttctttggcaagttggcttggatacctctagtaatggggagctcactacctacacagggcatcctaccccatggctgcgcagttctttgctcctcagaagtacctaaacctcaccagtatgcttacacacctccctcccaccagtcaaatatcaacaggcacccccaccataaacaggtacacagagaacaggtgaggaaatgaggaaatagcaagcaaacaaacaaacaaagaaacactgacggcaacttttcttactcctggtatttctaaaaagcagaacaaaatcaatttcacacccaagacatcttgaaatgttcccaaacttgggcaaagttgacagctgaattctaaggagctgcttcccattaagaagaggatattaggaaagaaaattatcagaactctttgtttaaactatggtctcagccaggcacagtgactcaggcctataatcccagaactttgtggggccaaaacgggcagattgcttgagcccaggagttaaagaccagcctgggcaatgtaccgagatcccatctctacaaaaacttaaaaacttagctggacatgatggggtgaacctgtggtaccagcagctactcaggaggctaaggagggaggatcgcttgagcccaggaggtcaagcctgcagtgagccatgactgcaccactgcactccagcctgggcaacagaacacagtgagaccctctctcaaaaaacaaaaacaaacaaataaccttgtctccagaagaggcaaatgagaggcaggacagcacagagacggaaaactcaggtcttggggcctggcaggtctgggtttgaaggccgctctttccccctttagctgagggacctggtgcatgtcatttcttagaggaggctgagtttcctcaactgtaaaacccggttagaatagtaccagtttcataggatggctgtgggatggaatgagacacgccatctgtagtggtcacacagagccacgagctattagtaagtcagttggccttcccacctggccactctcttgcggctaaacagaagaaggtgcagaaacaccacagagatggctcataagtgccacgtggggctatggattcaattaaaagaaaaaataaagtctggaggaaatggaggcaggcagaggtcagggacaggagaaaaggcgaaaaagcacaagtggggcacccaaatgcggaagccactagaagcggcgccccaaccccacccctgcaagagcctccaagaaacacttggctgcgtcacaggcttcaccccttcccgcccacacgcctgcaagatcctgttctcaagctgcagtctttgcagagtcgcaacccacgaacaagttacgaaatccattccaatggccgcagccggcaatggacaaacatgaaactagaacaggtcagagtgcatagcacatctgggggaaatactgtattgttgaaccttttcagtaatacgcacatgtgtatacctgcttatgtcatctacataaggatacaggcgcacttacgaagactagaatcaacaatgtcagcgtgcagtgtgcatagtgtatggtaagagtaagtactggtcgggcgcggcggctcatgcctgtaatcccagcattttgagaggccaaggtgggaggatttgatgagaacaggaggtcaagaccagcctggccaatatagtgagactctatctcaaaacaacaaagaaaaaggtggaaaaaaaggagtattattcagataaacctttcctattatatatatgtatacgcaatgtatatatcatacattcacacatatacacatatgtacgtatgtatatatatatacattcacacatatatacatatctacatatgtatatacacacatccacacatatatacatatgtacgtatgtatatacatattttgttaaattgtttttggttttacacatatgtatatgcacacatgtaatagaacatgggcttcttgctgtcagttacagccagggagattgaagccgctggctaaagcacccttcaggagcagctctcagggctctgggagcccctggcagctctatcctgtggctccaccgtgctgccagggagagcgagcagggcagaggccagccagcaatggctttccctgtggggagcaatgggatgttcatctatttcctgaagaggccagggcataacattaattctaaatggaacaattaaattccaattaaaaatcaattttaaaatgtgaaaaagtaataggtaccaaccgatgtctctttgcatccgtgagactttcctggtcccctatgccaaagttataagcaaagctcgcaccagagaaagttccgatttttcatgaacctgagtcagattctctggaaccaaagattagagtattgattcttccagcattcagcacatctgatagcacccagggggttataaatggcaacaaatcctgtgaaacatcagcccagagaataccgtctttattttacaacacttacaaagagatcccctaaggtttattttaaaaataaataacattataaaaagcaattttagtcaccagcctgttacagcaaaatatctgagccccagaatcctaggcagacatcatcaccagcccgtgtgtgattaggaaaacggggtctggtgagggtggcgccccactcagttgagaggctcccctctcaatccctgtccatttatcctgctgggagctctgtggtttgggtctctatgtcttcctttttttgaggtgttcaatttttccccaagtcaaaaggggtggcatccttctaagtcaccagctaagaacatcaaaaaccccagggctccatgtcctgctgaaggtcagggcgaggtctccgcccctcagcaccagccctcactctccttccccctccataagaaggagggccaagtgcggtggctcacgtctataatcccagcactttgggaggccaaggcaggcagatcacgatgtcaagagatcgagaccatcctggccaacatggtgaaaccccatctctactaaaaatagaaaaattagctgggcatggtggcgcgtgcctgtagtctcggctactcgggaggccaaggcaggagaatcgcttgaatctgggagacggaggttgctgtgagctgagattgcgccactgcactccagcctggtgacagagcaagatcccatctcaggaaaaaaaaaaaaaaaaagaaggaggatgagaaggagaaggaggaaaaggaggaggagaaggagaaggaggaggagaaggagaagaaggagaaggagaagaaggaggaagagaaggagaagaaggagaaggagaagaaggagggggagaaggagaagagcacaggtgccaggcagacattcctggtagggaagctctcattcgaggggtctaatcacagacccccaaagtgtcctgtctgtggacagaattccagcagtctggaacttgcatagagaaactatgacttttttttcactaatctctagctgaacattagcacttccttccatcgtgaatgtacacaacaagccacagaagcaaaaacagtacctggtacttggtcaccagttagaaatcacagctactttcatatgacactacatctgttccaggaatctcaggatagcgttcatgcccatcactacatggaaatgagagtagttatcaggactgttgatggatctatgaaaaaattaattttttttaaagagcacaaattaaaaaaaaatatttgggtaactatgtatcagtgtaattgatttcctttgtaacccagagtgttttcttttatacatttaaaagcattctcctaataaggggtccatagaggtcatggcacccaaagaggaaggaacccctaccctcatcaaaaactcagctcacggggctgacacacacaggagacccctaaccaaggctgtgggccaagtgggtgcagactccgagagaggctgcggggagatggctgctcctcagtcatccatcagcatcttcaccacattcacactttataataactaaactgactcaaagcgttttgtggagcagaaatggatgatgataaatgttttattctcacataacagtttacggacggtacgcaagccactgcactagaaccccacaactgctaggctggcaagctgagtatgttgtcatttcttaaataaagaaactgagacgcaaaggaatgtaatgctttgttcagagtcattgaacccacctgccggtggcagagaaaagcctcacagctgtcttctgacgccaagtcccggcacctggctgggctgccgctccaggtgcgggcatatactgcgcatgcgctctgtgctggcctccccacccctcccccgtccctccggccccgccttccacacccctgtccagccccctggtatgaacttaggtgcatgggacaccctgtgacgacgatcattaggacaagtatgcacttgcttattggcctgggagtcccttggcttctcacaagcttgaagcgctgcgcccccattgtcccagtgctatgacaagccatgcaaaggtaaacaataactagtggtcacaaggcgggacagtccactttccccagaatatctgcaaaaatgcatgccaaaggtagtaagccatttccattttccgacccgctgctgcacttacagtcctcctgctcctccagctgggtctcccaataaaatccaacgcctggagagggaaggttctggctcctggcccgtcactgggctggcctggatggtggcctggtgatgccggggaagccagcttcatccacgccagtcctctcatctccccgtgcagggagtagaaaggacactttcctcccatctccccgtgcagggagtagaaaggacactttcctcccatctcccccgtgcagggagtagaaaggacactttcctcccatctccccgtgcagggagtagaaaggacactttcctcccatttttatggattcaaaaacagagcccaccagtgtgtgtgcgagccgggttggcacctgagtccccaccccaccccttggttcaatgtaggacaaagagggctcacgggctccacgcctgctgcatgagactgaattatccttcctctctgttttacagtcatgattgccctgcaaaagaactttccggcaaaaacagcccttcgtcctcttcccccgtcttctgacctctcaaatttccctccagtttctggaacttctttgaagggaatctccctaaactactcgtcacaaaattacatggggtggagctggaacatttttgtttaggatgcaagatcctgtttaaactgcactctgttttgcaagctctggtgtttagcctctctatatctcctgggcttgtgggggtggggcaggggtgggagtggcgtgactcactgcagcaggttgcataaaccttattggtgcaagatgagtgagaattcaggtgcacatctttgaatgaccacctgcatatcatcagcccttggatagcatctctactttcttgggagattggaggtaaggatacaaaacaccacagagactcaccgagtctctaagcaaaaaagagtcaacagcagctgaatgttggtgggcagggacaccctgtgacgttcaggtgaagttcaggacccagccctgttgagtttgagcaaggtcaacattttcctaacatcttctgggtatttccacagttgagaataccaaatgatgtgggcagcttgctgggtgccaagtacaacatgacggacccacttactgggtccatttactgccaagccgggcacttactgggcccacgctagtggctgtactgctgtgtggccagacctggctgtgggaggtgggaggtaatcagggcttcacaaagagagaacagacatttcctccacagtgaaggaggagctgccactcccaccttccctccaccttctggccagtgtctctaacatgctcagcacaagtgtcacctggggtgcctgctaaagatacaggttctaatggctgtaatcccagcactttgggaggccgaggcaggcggatcacaaggtcaggagatcgagaccatcctggctaacacagtgaaaccccgtctctactaaaaatacaaaaaattagccggacacagtggcgggcacctgtagtcccagctactcaggaggctgaggcaggagaatggcgtgaacccgggaggcggagcttgcagtgagctgagatcacgccactgcactctagcctgggcaacagagtgagactccatctcaaaaaaaaaaaaaaaaaaaaatacaggttctagaccctgtcccacagctacagaagccagcttcccactctgggcagctgccattcaacaagcacccccatatgcccgtggttctcgagtactgatgggcatcagaatctccagacacttgtcaaaatccacgcctttacatttaccccagtctatgaatcagcatctccagaaaccaggccaggtgattctcaggcatctaaagtttgagatcctactttggatgagtgattttcaaagtggagtccccagacaagcagctcctgtgtcacctgggagcttgttaggcacattcttgggtcccaccccagacctcctgagtcagaaactcgggatgaggccccaccctccaggtgagagccactggagttagactgtgagcttcccaaggccatgcacttgtcctggtcacagcttagagtgtggtacttggtgctgagtcagcacgggggctctccctggcttctaagagaagtgaatgagttttcctcaccactgactgcccaggacaccccatctgggccagaaggagctgcctgctgtctccttctcccaggggccagaatacagctccttaggcacctgtatttgcaggaaaggctgctgtatggggagagagcaggccttgccctcagtttggctaacttctcacagctccagtttcatctatcttgctctaccgctgcaaaagaattgccccatgccttatgcattttgcctcagagtcccaggagtgcaatgtccaatgtggggtgtgctttctctactagcttaaagtacagaacaaatacccctctgctcctatatgaacatgaactgttcattctagtgatggctctgaacaaagccgggggtcccctttaagttggcttgaacatttgcatttctgttccagtcctactcatttacagataacacacggagccctccaagcccttgccacccctttccagtcctattccactcttccctcacccttcccagaccagctcaagcacccctcatccaggaaacttccccagccctttccagctctggctgatctacctgctctccaaaggtgaagaagccgttgccttcagtgagaatttggcactttggggctctcttgaacctttgtcttatttccccaataaaagtgatagtccgatcagggcagggtcaatatttattgtcttattttcattccgtcaaattactcagcaccccagagagttttgatcatgaaggtgctcagtaagtgttggatggcagcatagaggtcaatcacaaaagcaagaaaccacacagccactgctgcagatgaatgtctctggatctgcccacacccttagaatggttccagatcaactgggcgtctgtccagcagcctaggagtgagctttggatcctttacaaaaacaagaaggcagtagcaccccctgaaaaccatgccttacagttaacctgcctctaaggtacaggcccttccaacctgctgtttagcagggagaagggggccaggcatggtggctcatgcctgtaatcccgacactttgggaggccaaggcgggtggatcacttgaggtcaggaatttgagaccagcctggccaacatggtgaaaccctgtctgtactaaaaatacaaaaattagccgggcatggcggtgcacacatgtaattcccagctactcaggaggctgaggcaggagaatcacttgaaccagggagacagaggttgcagtgagccgagatcaggccactgcactccagcctggacaacagagcaagactccgtctcagaaaaaaaaaaaaaaaatagcggggagaaggaccttggatttggcttcaacagacctatgttcaaattaatcactacgtattattaatatcaaaataactgttaacctacagctgacctcagccactgccctctgctggcccactctggagggatctggctctgcaccccggatttctgcccttcctgcaccctcccaggaggacgctgctcctaccctatgttggggggcatttgagtttggagatcaaggagaactgcgaagagaagagaagaagagcttcagtcatggctggagggaggcattggaaaggaggtcagaaggacgcagtcagagagtgtgggaaaattggaatgccggaagaaggagaaatgaaatgagaaggggtgctggggataagttggatcccctttaatatacttccagaagtgcaaataaatgatgggatttcctttacattgatcttcaatgatcaaactgtgcttcttaaactaaacatgattctcagagacagtcacggctgcaatgcggttacaatgatgagaagcctttcctggccctggagctaactacatcccatgcaactggccccgacataggtactgctgtcataatgaccttgcaggtggggacagtcaggcagacaagaggttgccctaggccccacagctgggcaaggcaaagcccaaaatagagttcatgctggtgccaggtcagtgctctcagacactcatgtcctgtctctaggcagggccagcccctccccgtgcagggctccagccaggctctcacccccttccttaaaagtgaaccggatccaggaccaacagcttgagacagcactctgggaagctgatccccaagttgacgtctgaggctcaaattctctctgattcaaccccacgaggagccagctggggtctgagccggggcagcagggacagagctgccgccgggggtctgctgccagcgggcatcgccgaggagggcgcagcctgcgggctggatagaaaccagacaaagggcactccaggcccaccgggccggccatccggagggtctacagctaattaagactgaagggagcactgaataacccttttgtggatcaaaagcactctgttggaaacccagctgacaactccaacaaaactgacttcatggtttcttatgagaaaactgtgaatacatcgaggactgaagaagcgctttgttccagaccttcgtgggaccaccagagattcagattacaaagcggccctgcccggctgcaacaaacagcgcctcgctgaagccaaggctgtctcggtgtaggaaagccagaaataacacattacactgaagccggggcatggtgtggccacgactgctcgctcatgtgcttcatttacagaaaaggacacacacaccccaccacaatccgattagaaccagacaagactggaaggctgggcacaaatcacactgagcccctcccccaagagggtctcctctgagcctgtatcaggatgggttcttcggacatttaaaggcaactgaaaatacaaaggctcctttcacttctgcactccaggctgctctcgggcatcacccagaacttcaaacacgccccatgccaggatcccagccccagggactgtaatgtaattgacctcggtgcagcctgacgtcagcatttgtaggagctacctgggtgtcgtgagttggatggtgccccctcccagaagatatgtccacccagaacctccaaatgtgacttgactggaataagggtctttgtagatatcattaacccttttcccacttgcccaagaatactccccagcagcatttaccccaagataactttgctgcaaaataccttgcttttattattattttcaaatcgctctagtgtattgactttggaaacaaaacacatcattccatttatagcattctggttttagtagtggtatttccatttacaaaactatagtaattctcgagtgctgaaaatgtcaaatcctagaaaacgtcgcattcctgcacgtgatgttaacattgttcttgaaaacagttattggccagagattcatttgatgaatccgattcttccgaaacagatgattctgatgatttagacgattctgatgttagttctgtgcagaaataactccaagaacagtttttgtattttattttcacattgaaaatccatcagatttgcttcagcctcaaagagcatgtttatgtaaaaaatgagtactggcagtgagctgcactttattttctaaacggaaaaagggtgaaggtaaagatctctagatgagatcatcctggatgagggcgggccctaaatccaatgactcgtgtcctcataggagacagaaaaggagatcctgcaaacaaggccgtgtgaagacagaggcagagactggagtgatgctggttccatacaaggaaggccaaggatggaggtcatgaggaacaggagggaagcctggaatacatgttcccatgcagctgccagcaggggccaccctgcccacaccttgactttggccttcggaactgtgagggagcaaatttctgtgttctaagccagcggtcctcaacctttttggcacgagggaccagttttgcaggaggcaatttttccacacacgggggggatggtttcaggatgactcaagggcatgatgcgtattgtgcactttatttctattattattacactgtaatatgtaatgaaatcattacacaactcacaagaatgaagaatcagtgggagacctgagcctgttttcctgcaactagacagtcccatctgagggtgatgggagacagtgacagatcatcaggcattagattctcataaggagcgtaccgcctagatccctcacaattcataataaggcgcaacctcctataagaatctaacgccgccactgttctgacaggaggtggagctcaggcggtaatggtcactcgcccacactcgcctcttgtccatactggtccatggcccggggttggggacccctgttcgaagtcacccaggttgtggtggtttgttacagcaggcccagggaactcattcagcaggtggatttgggtggccctaatctaataagactgatgtccttataagaagaggggattaggacacagacacacacagagggacaaccctgtgaggattcagggagaagaggccttctacaagccaaggagagaggcctcaggaggaatcaaccctgcccacaccttgatcctggactccagcctccagaactgggaggaaacaaatgtctattgcttaagccaccagtccgtggtattttgttaggtggccctcacagagtcatacactaggtacttgctgtatgtgattttatctgatcctcatggcaattttctaagttgtgtttaggccctgcatggtggctcacacctgtagtcccagtttgagactacaggagtttgagaccagcctggactacatagtgagacccaatctctgaaaaaattaaaaagtagccagatgtgatgacacatgcctgtagtcccagctactcaagaggctgaggtgggaggatcacttgagcccatgagtttgaggctgcagtgagctgtgattgtgccactgcactccagtagcctgggcaacaaaacaggaccccatctctaaaaaaaaaaggaagttgttgttttattattattccctttttgcaaatgaggaaaataaaactataaaaggttaagtggcccatccaaactcacatatacggtaaatgtcagagccaggatccaacctggcctatctcaggccacagctggcactagggcccctggttctaggtggcagcccctggacacagaggccttcaaagactgggaagtgctccctctgagcgggcagtccagagccggtgatgctcactgttttgctgcccttgggcctagaacagagggctttgcacgtctcttgcattgtctcagggctgtttagtcccaggttgagggtaagaggaaggaggagcccccaaagccacagttggggttctcagtggacatccgggggcaagaaaacctccagaaggtgcaccttccatcagcaacctgggaggggaaagatacgtttctatgaagaaaagatgcattcacttacaacaggaactagatttagttccctttaataagaacaacactgcccatattcaatattgaaataggctgtttttcagtatttttacccagagtagctaatttgatcctcaaaacacaccagcaaaataagtaaaggaagaatctctccattttatgagaaaatctcaggctcaaaaacatctgtgtttggcagggtgcagtggctcacgcctgtaatcccagcactttgggaggctgaggtgggcggatcacctgaggtcaggagttcgagtccagcctagccaacatggtgaaaccccatctccactaaaaatacaaaaattaggcgggcgtcgtggcgggcgcctgtagtcccagctactcgggaggctgaggcaggagaattgcttgaacccaggagggtggaggctgcagtgagccgagatcatgtcgctgcagaaatgtctgtgctctctacatcagcttcgtccctgcaaaacagcggtaacacatctggcctcccgggctgtgaggaagacaaaatgaggcaatggacccaatgcacaagcatggctatcaccaagtaagtgctcagttaaaggccacacatgacaatgttgtgcccaaggtcttagcactaattagagacaaagacaggaccaagccccctggattctagaacttcctgtactcagcacaacactctctgcaccccgccttttttatgaagttgattcatgaattcaagaacagcccaactcagatggtcacactcccctgtcccctctcctctctcaggcccagcccctggacactgacctctccccactctgctcctcctcctcctcctcccagccccgtcgtggggaaggcagggcagttccctggcatttggctggctcctaagtgtcagttgagtgatttcatgaatgagcaactaccctgattactctgattactctgaaggttcaattttgattttttaatttctatgtctcatagttagtattgccagtaagaaacacaagcctgatttatagattaaaagacaaatcttctccatggctcaataaatactgactcgtgaacacaagataaataccacttagtaagatcactgtatgaacaacaagaggttgaacatatacattagagacgcaagctaactccctgtgttgaaaaagtaggtcattttggcagtgcactgtggctcaggcctgtaatcccagcactttgggaggccgaggcgggtggatcacgaggtcaggaaattgagaccatcctggctaacatggtgaaaccccgtctctactaaaaatacaaaaaattagccgggcgtggtggcacgtgcctgtagtcccagccactcgggaggctgaggtaggagaatcgtttgaacccaggaggcagagcttgcagtgagccgagactgcgccactgcactccggcctgggtgacagagtgagactccatctcaacaaaaaaacaaaaaaagaaagaaagaaaaaggaaaaggaaaagtaggtcattttgaagtaatagtagagcagaaactctttaacatgggaagatgttcataataaaatggcgacaaacactatgtatactaggccccttcaagttaggaaagatctaccccaaatccttagcagtatacttgagtgcagagagtaatgtgcgtgttttaccttttaattgatctgtatctcctatgatgagcaaaccatagtactttcaaaacaaaataactttatttaaataaagctaagcaaggtgtagtggctcatggctataatcccagttatttgagaggctaaggcaggaggatctcttgaggccaggagtttgagatgcacctgggcaacatagcaagaccccatttctacaaaacgacagcaaaaaattagctggacatggtggcaagcacctgtagtccccactactcaggaggctgaggcaggaggatcatttgagcccagcagttcaaagctgcggtgagctatgatcgtgccactgcactccagcctgggtaacagtgagatcccatctctaaaaaaataaaatataaaatgtttaaaaaaaaaaaaaaaaaagcaaaaaagaccagcacggtggcttacgcctgtaatcccactgtaatcccagcactttgggaggccgaggcgggtggatcatgaggtcgggagttcaagaccagcctgaccaacatgatgaaaccccgtctccactaaaatacaaaaattagccaggcgtggtgatgggtgcctgtaatcccagctagtcaggaggctgaggcaggagaatcgcttgaacctgggagactgagtcaggagaaccgcttgaacccaggaggtggaggttggagtgagctgagattgcgccactgcactccagcctggttgacagcgcaagactcccttccccccccaaaaaaatctcctaatcttctgtgtctgtgtggcaagccatgaactccttctcagaagaatgtttttaaatgcattaaataaagcatgaggtggggagagttccaaaggaagccagtgatactaaaacatacagaattatcaaacagtgtttatgcttctgttataagaatagatgggctactttcacatattaaacagcaagagctagcagcaagtctagtgaactgggcacttggaagcagtgatgagcatagcagtatctctggatagctgtaacactgtgtgcaggtatctggggtttctgtcgtgaccacgtggcaggagctgctgccactgctgtctgatgctcgccccacagtggaaggagatgctaaattccgttacgcattagaggtcagtgaaaaggaagatgcagtttgttcccgtccaggcacaaggactcttgaatttgtccatagttaagaacggctcatccaggagcagagcgagaggccgggctgcgcgtcctcatctcctctcccagccttcgcatcctcctggctgcctcgcgtttcctccacgggcctggctgaacgcacacacaggcctgggggagactgcagagacacatcttcagccacatcttctgtaaaacagtcactatgggatgacggtgactggacagtggctccgtgcagtcggtgtcttttgcaaagttttccaccgtgtgcatcctctgcagccaactccagctgagggagaacggaccctcggtgagttggggctgcacagcaggtatggcctgctgccttcaccccacacctgctatcaaatgaatcagccccctttccctacaaccccaagaaaagcctcaggacccatcaggggaagaagaagctgcccatatagagagagggaagggatactgctcctcattccccacacggcatagcccaggtgtagaaagtggccaacatccatttaggaagccccgtttccctagctgggaggggccctgtcctggggaggaggccagtggaaaggacaaaaccattttggaaggagccaagagtaataaaaatggcaggttacctgccttagtttaaactgaataagcaaagccacgatctcatctgagtcccgtacaaggcacaccactcataagctaacttttctcagcttctctttacaggccgttggcgagtgggccctccaaccgtgggccacagctcgtgaatctgtttgttggggagtcatgttcaaacccaaagaacaaggcaaaccctacccccaaggaacccagataactccttatttcccctttttattcttaaaaagtacttctcccaggttccggcggagtgctgttctcattttagaaggctggctaactgtgggtgcaagtcatttctcaaagcagtgtctgttcttttctttaatggaattgttttgttcatttgtttcacttcctctttggggttcccaaggaacatgagttccttttttcctggtattagaagtgcgtcagttcaagtatgagtacatgaaaagtgaagaataagaggctggctccattaggtgatgacatgtacctgctatgagatttgggaagccatggcctgtcattgttgctcccgcattattgtccagcttgtccccagaatgagagccagtctctaaagacatgcccatgagccgggcagcacataacagagacagggaagaggtcgcttgggggctttgtcacctggaagaaatcccaaggcttatcctaaggacatggaaagctgaagaacagaaagtcactagtcaatggcaggaggagggcatccaagtccccatcagcctagaacgcagccgactgacaagaggtcagtgccaccatcatagtcctatgctttctctgcccccggtaggacttcgaactttctgaaggctttgggtgtgaatgatggatcctccctatgaagaggaccacatctgatgtagtagtttacaacatctcaacatgattcaaaaatagatcagcaagaacatatttagcaaaaaaaaaaaaaaaaaatgcaagtcatcagatgcaaatgatgacatagaattcttcccaggcctagatatgcaaacagaagcagtgcaagggccgtgtacacaatgacagtgtgggtgcagataagacagtaatttcccggagagctttggttgatggaattccacactccatgaccacacagcctacgagggagtagatcacaatctcacccagaaccacaaatgagcctcctggtgtcagttaccttctttttcaagaatgacgccaagctctaatccctcctcactgagtctttatgagcttaaagtaactgcattttaaaatctgtcacatttggacattttcccaaaacccttgctctctgttggacgaggcacgtttcatgttgactattcccatgtcccctggttcttcttttcaatccaaaagctgggaactttctactttgaccaccagagcttctctggcaggcgattttccactgctattttccttgctgtccttctctttaaaaaccaatagcatatgaattcaggatgcggggatatcttgtgcgatgcagtaacaggcagagtgaggggcagcagtgggctagcaaagaggtgaagggtgaaggaaggcctgggagccaggcagacccaccccttcctgagtgtttcctctgttttctcatctgggctgctgagattaaggagataaatgcatataaagcactgaccgtgctttctggcccagggcaggactctaaccattggttgtgcccatgctgaggactaaccttggcccgggaaaaggctggaggaggcccacccaaaagcagatgcttcccaaggcccggtcactgcacgagagccaaaagcacacatcagatgggacagtatgcaatcggaggggacctgctctcctggaaaagccaccctgaaagctttcattggccagatctgaaggtgttgaggtttgagccaactgcaaagaggtaaccgcagaccttggttgccagagaagtcactgtcttttccaagcagtagaaccacattcgaatcccttggagcttgtcaagagccctcaaaatcttactctatgcagagaccgccaacaaaaatgtgtcccctcaaattatggcacaaacttcagaggggaggtaatttaatgcacagaaccacccaccagggaaggacagtggataaaatgagaggttcaagagacacacggtgaaaagtgcccacagagaaattgtgacattgaataatattaaattgcaaaggatttgaagcccagataaacaccatgagctaatatcagccaaggaaagtatgattcagtcaatggaaataggcaaacagttcaattaatgtttataaacaggccttttcatcccttcccccagaggaagaaacttgaggggtgtgtggcccacaaggtgaggagacagcggctgacttgaagtctttgggctcctctccaggcttctggcaagcagagaccatgccagggggtccagagaggtccaaccagcagcaaagctcacccaggtctcaccagccagggtacgggtcacctactgcttctgatgtgacagctgaagctcccagatacttcttttttgacacagccttcacctactgttctttgaaagtgaacttttgttttcagattcttgaaaatctggaagagaatcccaccacaaaagccactcatccctccaggtaacaggcgttccacctggagggggcagcggagagacgggtgtgtccagaaagccccagggcccatagctgcagcacagaaaccatggaggagggagtgggagagggtgcacaggagcccgtgggcagacctcaggctgcacgtgcaaggccaagggggtgagtcccacccagggtaagtcccaggtggtgctgggagcccgtgccctccgagcctgtttacaagccatgggctgcacccaccttccccgtggaggccctggactgtgaaaaagaattgcttaaaagtcaggataagtattggcctgaggatgtcatgctccaagcagaacagggacccactgtcatagatcagttcatcccctccctgcagcagttagaaaagggggcactgatgccatcgtgtcaaacaccaagataactgaagtctgccaaggtgggtcctttctcccacttcctaacttcagcctcttcctccccacggcctccctgccctgggcctgcgtagggccttcctgctgactgcctccctcccgtcgcctctgtgctgcctccccgacgcccaggcctgtcccacttcccaaggcctctctagaatctgtttcctctgcctgtatctttcaactcaaagttcatcagatcagtttattcctccattgaggccagagctcctgctgcctttgaaagccacatgtgctttttcagaagatgacctttggcaaaaaaacaatttgttccttttcctttggccttaacaagatatcagggaagtgagaaacacagtcgggcaatgaagtggaagtaaacgttgaggggaactatgcaagacttagaaggctcacaccataagcagtgaacgtgacagggcgctttcctccctggcaacagtggcctggtcctgcctatgggctgcatgcctttgagggcaggaagctatgtcccctggtggcggtggtggtccccagtccacacacgacacacatcgcaacggccaccattagacacttgttccaaagcaaagtcagcccctccacaaagacagccccctccgatgatgctcttcttctgcagagtaaggaggcctcacaacacagagattgctgtgtgatttctccaaccacagcctgcaggtcactgtcagcatttcaaagtgtccacgaaggaatcaccttcattgaaaaacgaaaccaataaaacctgctttctacccttggtgccctcccttgcagagcccttcccgttaacgagcgctcctgcaatcacagcgtctcatttgcatctgtttttcatcagaggcagaagtgtcagcccttttccactggggccagcaggtcactttgcctgggaacagagccgtcagggacacccagcaatctttcctcctaattacagtgtctgcgctaaccactccaggatggtccctgcataactggggtgaaaatctaatataacactgtctggagatcttccacattcacctaagccggggtgcaggaattaaagtgtctctgacattatgctcccgtcccatctcctgcacactgatttgcaaagtgaaaatgatcctcagtacaaaacctgtctccatctgcaacctgcgagaaacatcaaaagaggcagggcgacagcctgaaggttccccgaagtcctgcggaggaaaaggagagcttctcagggagaggcagccaggcggccagcacaggcacagcgtggcgtagaatttttaagtccctctttggcgcgtcttctctacaaagcctaactctcaatccgtgttataacatcctcacattactgttcccaccttgggttctcagaagtctgtcaatgctggtacatgatggagactagagtctctgattagaggccaacgcagcacacatttgccccaaattgtccttggggtttccagcagcagcccctgcataatgatgcttggtgtaaactgacccagccccacacaggaaggctttgtgtgtcagttacccctaggaaaaggacagggtcaaaagtcatcccaagaggaaatctggccccagcacccaaggcctcctctctctgtctccaggaaactctcgtctaacaaatcagatattagcaccatgaaccctgagtgccacttaacctctgaacttatcaaacaacaccagcaaacagccatttactcctaggttacccaagggtatctaaaagagaaaaaaggaatgaaggaacagctttttaggatcttggtggacattttatgggcatatttacttgttgttggcgtctttacagcttttccctaaagactatcattatggtaacagatggcttcatctttaactgctcagtaaataaaagggctttaaattttttttattaatctcttttaggtttcatctcaattatcttaggggaaaaaaggtctctattgcattgactaggtcttcttaaacagattaattggctatgataaatttttcaaagttagactcaaaattcacagaacatgtaatcctagccagagcaattggtggctttctggaaagggacctgcctgactttctcagaggctctcagaatttgccattacacttttttgcttttatagggaggggaagtgacaagtcttctaccacctgcaaagaactgctttccttggtaacctggggatgcgtccgcccctcggtggatccatcggaaggaagtgccctgtctcagtgtgcaggatgatgcagaattcttttgcctgcctagagcacctagcaagggccaggctttccctctttcattcttttcttcattaatgcatccagcaagatttattgagggcttatctttgccaagcactgtgctaggtgctctgaatacagtagtggccttcacaaagtccctgccctcatggagctcacatgctactgacacagaccaaataatacataaatacaggggtctccacccactgggccacagcctggtactggtctgtggcctgttaggaacagggccacacaggaggaggtgagcagcaggtaagcgagcactactgcataagctccacctcctgtcagatcagcagcacacgattctcataggagcgcaaactccattgtgaactgtgcaggcgagggatctagttgcatgctccttatgagaatctaatgcctgatgatctgagatggagctgaggtagtgatgctagtgctggggagcagctgcacatacagacttttgttagccaagaggtttgactgcacagagaccataataagtcaactgctttcagactcataacaaaaccctctcagtgagtggcaagacacaattaagctgcaggcttcatggtggcaagtgagcttcagttgtacagctgcatcaagtggcaataaaggtaggtctgagacaacttcccatctccatacattctggattaaagtcaaggcagaatatcctgcggttgccagaaaagcactggaaagcctgcttccatttccaacatcctatctttgtgaagcagggttttctgcagtgacagcaaccaaaacgagatcacaaagtagactggacataagcaccacacttcaggtgttactgtctccatcacccccagatggaaccagctagttgcaggaaaacgagctcagggatcccactaattctacattatggtgagttgtataattgttttattatatatattacaatgtaataataatagaaataaagggcataagaaatggaatgcacttgaatcatcccaaaaccatcccccacgccgtggaaaaactgtcttccatgaaaccaccctctggtgccaagaaggttggggaccactgcataaatacacctggaatatcacatcaggtagggaagaaaaataatgccatgaaaggagacagatagagtcctgggcaggttgagggtcagcaaagaaacctttctgaggaccctgaatttgagcagagacctgaatgaagcgagggaggaagccaaataaatatctgggaagatttttctagaccaaggaaacagcagtcctgaccaggaaataaggttgttgcattaaaggagcatccaataaaggttaaagaaacaaggtagcaggtggtgagaaatgaagctgagaagataaggccaggtcacgtagtttttgccagccattctcaggaaattggatttgatctttttttaatgaagttttccctctgtcttccctctttactacaatgcacttaagtgtggttttcctcatatctatcttgcttggggttcagagtctttttggaataagtagtttaaagcctgtcatctgtttgggaaaatttttcattattatctcttcagatattaccactctctcattttctcccttcttctccttgttagaccttttactttgcatccttatgtctcttgctcttttctgatttcctcactttgtgcttattctagatatttttcttattccagttcactttctcctcagctgtgtctaatctgtattaaaccttggggtctgaattcgatattttttttcatttctaaaattttcttttgattctgttttatactttctagttctctgccaaaatccccaatttgtatttatttccttgaccatattaagcatggttattttaaatccacaaatttagatatatgtctctctctcaacactgtcttgtctcctcatgcaccaggttattttggttgcatgccagacaatgtacatgaaatacatggagatatggaagaatgttacctttttccagacagaaattacagttacttatgtctggaatctatgggccctaacaatccctaacctccttaatccaatctggggttgaaccaattcaaacctggcttaatttattgcaaatgccagactattttagatcaatttttactcctaggctgtacccttacgtggttttcccaacacaaatactgagatagttgtgggggaggggactctgggtctcaagttccttgcagaccctgaatgcccatgtctgttctcctatccctgttgtctatcaacagctctattagcttctcactctctcaggcacctcttctggaaaaaggatacctaggggaaagtggtcacaatgctggctcacctttctgtattttatttctctcccagatcttgtccctaaaattattgactgccttgtgaactgtccagtgccttcagatatttttaatattttcttcttttctagctattctcaggaaaaggattggcttttattgtatgtgtgcagaaaaaattgctcgcaaaaattacccaaattctccacccctccatctacacacacacacacacacacacacacacacacacacacacattatttattgctggggctcagaggacaataccccaaagtatcgtgctttgatatgctgagcacatcttaattaaaggaaattggaaagcctcaaaagctaccgcagaaccatagactttctaaccttctcttgtttctctccacaattgtcccctccccacaacaaccaaatgcagagaggggctctctctggaatcttcttatgattgaggaaacttcttgctaaaagaaattcaattgtcagcagggcacggtagatcacacctgtaaccccagcactttgggaggccaaagcaggtggatcacttgaggtcaggagttcaagaccagcctggccaacatggcaaaaccctgtctctactaaaaatacaaaaattagccgggcatggtggtgcattcctgtaatcccagctacttgggaggctgaggcaggagaattgtttgaacctaggaggtggaggttgcagtgagccaagatcatgcccccacagcttgggtgacagagtgagactccatctcaaaaagaaaaaaaaaggaattcaattgtcttaaactccctccctaggaatcttattgaacaacgaagaaagattaacccctagagaagagactcaaagtctccacatccagacagactttccatctattcttctaagggcagctctgagagattacctgagggactgtacgtacataacaaggcggcctttgctcacacttcagttccctcccttaatttcctataacttgtccccaagctgctgtttgtcctttggtcccattcagcatcctaagaaaataatttacaaaccattgtctggtcttcaggcccattcatgcaccctaaaatcactgactaccctctaaaattgcctgcagctcctcacttccctccctgctatgatgagggtatcaaagcttcaaccatccagcctttcgttggtcctcatattttgtatggctcccatgcttaggcatgttaataaatatgcctgcctttcctcctgttaatctgttattagttcatatcagtgaatcgtcaaagggcagaggaaaagcttccctcttcaacactacattataaattgtaaacatgttctgttttaataatataatatataccccataaaatgtacaatgtgcacattattaaatgacagaaggatggggaatgagttaatataaataaaatgtttaatggtttctgtacctccacactctgaagacctctggtctgggaacacttggggggctggagcactaactattgtggggcaggtggactgggctagaggtgataagaagtgttaattcagaatgtattttgaaggtagaattcaaaaggtttgctgatgaattggatgttggtataaaagcaagagaggagtcaaggatgaatcctatgtttctggccattgcctgagatgggaaggatcaggctgcactggggatcacgagtctatggtccacactggcacgttacagaccctgaaatccaagtcagtagcaggttttccccccaaagatcccttccattccagggatggagcttcccagggacacagcagaggacacgtgtccctcaagagggcaggattgtttgtcaaggaaaaaaataacttctctcccactgaaattgaactcataagaaagttgtgtaattttaaattccagctcttccataaacattcctcaaactcttcccaccacttccaaactgtgctagcaacagctttagtgcatctggacgtttcccaatctgggctcttcagagtatccagtgtacgagttaatacctatcctgtggcagaggaggaggagaagaaagaaggagaaggagaagctggaaagtgaggaagaaggaagaaaaggaaaaagaaagaaagatggaaagaaggaaggaaggagggaaggaaggaaggagaaagaaagaaagaaagaaagaaagaaagaaagaaagaaagaaagaaagaaagagaaaagaaagaaagagggagggaaagaaagaaaggaaggaaggaaaagaaaagaaaagaaagagagagagaaagggaggaagggaggaaggaaggaaggagaagaagtgagaggaaaggagaagaaggaagacaggaaaggaggaatagagaaacagaaagaaggaggaaaaggaggaggagagaaagacggagcagaagagagaaagataggaaaaagaagaaggggaagaagagaatgaaagagaagaagtctaagaggaaggggaggaagggagggcagaagaagggaagatggaggagcaggaggattctcatgaccaagtttggaaaatgctgcaataaacaacatgcacatgatgaacatctttccttactgtgggactcctcagagcctttaatatgctattgcacaatatgactctctaaccaggatgcagagtacgtagccattccctgacttattggctctgaatgcttattaatagctcatgagtaattttgttctgctgaacaattcaggagacattgctgtagaccccaggtcaacaactatagcccaaaggctaacgtcagcctgccatttgtttttgtattgccagaaagctaaggatacttgcaacatttttaaatggttggaaaaatttaaaaagaaaaacaaaacttcatgacagatgaaaattatataaagttcagatttcagtgtccctttatttttattggaataccgtcttcgtcagctcaggctaatataacagaataccatcagctgggtgacttaaacaacaaatatttatttcttacagttctagaggttggaaatttgagtctagggtgccagcatggctggggttctggtgagggctcacttcctggtttgcaggtggctgccttcttgctgtgacgaaaaggagagctctggtctcttcatcttcttacaaagtcactaatcccaccatggggggctccacccgcatgatctcatctaaacctaattacctctcaaagggcttcaatacatggatttgagggagacacactgagtccacagcaacagccatgctcattcacttacctatcatctgtggttgcttttgagctacaacagcagagttgagtagcttgcagcagagaccatttgtccctcaaagcctaaaatatttacaatctggctctttacagaaaaggtctgccgacccctgctcttagacttcccacacaacgtagcattaaaatatgcattgtcattctgtatttcttcactgttaactcttatttcctcagctctattcactactctgcaagcaggaaccatgccctataattttctgtttctggcagaatctggcacagtgctgagcacaaggacagtgctcgaatatctctgtagtggccttcttgccaagcatcaggtatttattgggaggtgacacttttcaaagaaggtcattgggaggcacgtggagaatggtagctttgagaaaatatctcctggggagacaaagccactctgtgttacttaggacaagcaaggacgggtctgctgcatgggaaaaaaaaaaaaaacagcattgagtgaacactggcttttatgtatacagtgtcttgatcatttttcttttaggaaagaaatttaaactacacgattgaattacatggtatattagcttcagagcattcaacgctgtcagctgggaataatagtaataccccagtctgtggttgttttgaaagttgagtggaggaatggaacaagataatataaataaaaactgctttgtcagtggttaaggtgctatatcagcaagttatgcacacccttctggtcaggcccgtcctagcattggtgaggcccaaggcatgtataaaaatggaggcccacaaaccacacggctaaacactgaaaagtaataaatcaagttaacaagctgttcagttgtgttctagccgcctgcttgataaatatgccttataacaacctggaaaacctggtttgaatttggaggtcttgggctcccaagacagtgctggaatatggtggtctgggaggaagtggctctgtccactagctggcatcccaccccctcctttctccctttctttttcccctgcccagttctgtctcacctcctaagaaataggcacctgtggttgtgcagctcacatggccaaactccaaacactctccacacacacagccatctccacttcattgccaccctttggccactccttggctaccccttgggcctaacagtacacaaccagctgcaggtttgctcttgggagggatcctgggaagaagctgactttggaccatttgagtgggaattccagagtcccaggtgccagaagcatggtctagaagggaagtgagggtggggtatgtcctctgagccccacaggctcctggccccatggtaggacaaggtgaggcccttcttgtccaggcctcaggacaggactgattctgacctgaagctcagttatctcactaataatcactacagtgacagcagcaaccgtgtgtcgagtgctcctgcgtgccagccactcttctacgtgcctcgcacttactttacttaataacaaagtcttcctcaactggggctgtcaagtgggaatctgtttgcatcttggcacgactgtcacatgaaagccagttctcactgaggaggaggattttctaagttccttagcacacggggagcaagcagagaagcaccagctcagcgaggctcttccctggggtaggaggacttcctcccacgggaacggcccagccgcaggtaggacgccagaaggtcaaaggatgttagaaacccaagcctctgccttggctgatccaggggatccgagacagaagaatggagagcaggagcaagtgaaaacctgaccccctgcagcccacacctcgatggttggagcacagagcttttaaccatatccagaaagatacctgagagccctggagcatcggggcctgtagcctgctctcccgggcatagagtagaggaaattgcaagccccagggagagccccagccttcagctcagaaaaggcggaagaggaagaggaaggcacctaggagatgtgaacctgggcgaacctgaggaagaatccgccttggcctgtgtacagcatgcagggagtcaagtcaagggggtgtggattgggtgagcgtggtgggcgggctggaagaaacctgggtagtggcagtgatatctagaaaagttttcttccctgataaagacaggcatgtgaggagaaataggtctgactctaaaccggctgagtgtggaggtgatggatggagcagcagcagccttctttcaaccagcagaagataggcctaggaagcacccatcccacagaggtggccaagcagaaagagggaaggcagcctgatgctggaagacgcctctgaacccctgaaccccagaaaggctgcctctatgctttaaaatgtggtttcttgctacttaagtcttttttcctgggactcttcctggctctcagtccaaagcttccaaatgaaaatgaaccttttcctgctcctatgtggagagtttcttttctgcgaagggactccacgtccttgcctttcctggagaaggcagtgggaaggcaagcaggtcgccaacacccaccactgcgccctgggagaagtcatttctgcagggacagttctgaatgagaacaaatacttgagagtatttaaggaaataaaggacatctggttacacagcggctttgacggaggcagcaagagatgggtggtgaagaaacgaagaggatgaaggtggggccgcccacggggacccagccccaggggcgagtgctgttgatggtgtggttttccttcagaatcctggcaccaaggtgctgcggaggccgaagcaagtacagcaagctctgagccttggggttccatctgcgttgaactggtgccgtctacagcacgtgagtaaatacaacataacaaaaagaaaaggtttttctcagagcctatgaatatggaactactaatttgagtccaggccatcaatcccaatctagtgacccaacagccatggggtgtgtatgcacaaaaccacttggatgagaaacaggatggaggagggaagccactaataaatgcctcctcgggcgcccgctccagccgcgcactgtctcatagcccaccctgtccactgaggcacaaccccactcgtggccttcccccaactgaggcttcagggggctcttgggggctgtcttggctcatatcgggcccaagtctggtcaaaagtccaatctctacctcttggcatgagctggttccttcctcagctcctcctacccctgcccccaccaggtaccaccttccatagattcttctgttcccacaggtgtgcaaggtagcggggagacctgtgtctgcccaacaaggcccgggctccaggggccctaaccaggtgtgggctgagaacgggagctccccaagggcgggccgcgctcctcatcctctcgctaagcccttgctgaatgagtgaaggaggggctttggaagcccaggtctgcagagtcgagagagaacctctccgctcccttgcgtcctcaaactctgccctctacttcctgggtacaggccagacttcatctcccagcctccctggcagatgagggcaggctcctcttgatggaatggggtgaaagcaaggaagccatatccatgctggcccataagaagctgctacagaacccttcctcctcccttcctccaccacccagcaggaagcaagggagcccggggcgccacggtggaccacaggatgaatgacacaggcccctgggtccctgagccgctctctcagttccgcctctcagcatgaaagatcccaaatgtgggaactatgtgttctagcagctggcatcgccttcaccaactcagggtttaggacaatattgtttgtgccccaatgtctaacaacacttttcgttaaataatcatcatcacagctgatatttaccgagaccttcgagttccagccactagccaagtgctttgtcaggatctgattttttagagctcatgaccacccctgggatgcaggtgtgtggtgtggggatcgttgcagcctccccacatccattccattccttcccaagcgctgcattctgattaggatgaggttggccctatccttagcaccaaagatggaccccgactgtgtccagggtggacagtgtgtgtcctaagtcagtctcaagagctcaagagctctgtttcagatggaggaggaaacaccacctctctccccaaatattaataggaagatgtgaagcctggatgcccttggacatcctcttgcaaccaggagggaagccagcctgagccaattcatccaacaaagccaattcatgatgtaggacaaggcagaggcaaaagaaccacagagaaacagaaccagagcctggtgcagttatacctcaagctcagcttggcagaagcagttagtactcatgaaatattccatgtgcttgccacgtgccttgagccactagggctgccatactgaagtgccccagatgcggtaggttattgtctcagctctggaggctggatgtccttgcagttaaattggagccatatgtctaggtctggccactaaattgtaaatgacagtggtatgtgtcacttcttggctaaggcaggtaagagccagtgtgctttcctctctcctgatcccatgatgctcttagtagccaggtgccgagatggggaaaacaagagggcaggaacgtggatctctgcatcaggaatggaggaggggcccagctagcggcactgaattgtcggtgagcaagaggtgtacatcgtggcgttatgcctccatgcttctggtgctcacaatgctgattaatacatctactgttcttctaaaatcaggactcctaaattgccaagaccagtaaaatcccgtgattgttgaagccagatgaaatcaggttttttgttagttgcagctgaaagcaacctaactcatacagtattgtcacttctttaaaatgtagaaactagggcttagtgaaatagagtgacttgctcaaggtcacacagctaatatgtgacaaaactgagcttccataataatgccaggagttcacagtgtgcggtccccatactatctccctcacaatcatttgggatacatgtttaaaaagtagattaactggccccatgaatactgatcagtccatctctggataaggggcccaggactatggattctcatgagctctctggtggctgctgtccgttcaaagttgagaagctctggtctaaactgagacctcttcaggaggtacggtgtcacatgtcccatgtgtggggaactggtgaaaataaatccatttgaagtacaaacatgtttcagttggccactctccatgctacagtgtgtttgccagtgtttataaacacagttgagaaaaagtcatcaaacttcatagcccatggtcgttgacataaacaaagatactctccactgagttttacttttaactttgccattaagatggcagcgatcttagttgcaagaactaattgcagatttcatgctgaatttttttctcatatccccaaaattacaaattctgtgttgaaccagaaatcattcattcagaaaacatcctacgtattatacaaggatacggaagaaaaaatgcattgcccaagaaaacgtgcctgtgggtgtctggcccatggatcatgatcaaggaagatgtagactgcaattgtgatacacagccagtgcactactgtgatacatagccagtgcactatggcagtacatagccagtgcactactgtgatacatagccagtgcactatggcaatacatagccagtgcactactgtgatacatagccagtgcactatggcaatacaccaccagtgcactactgtgatacatagccagtgcactatggcaatacatagccagtgcactactgtgatacacagccagtgcactatggcaatacaccgccagtgcactattataatgcacaactaatgcattattgcaatacacaactggtgccgcctcaaggattgacaatgtacattaacctagaggcacaaaccatccgtgaaatttaaaaataagtaaactatcacgtctaggaataaatctaataaaagatgtgtaaaacctcctcaactcataaacattgctgagaaaaatcaaagaagacttaaatagagagagatgacatatacataaaaaaaactattaagagaaacaaaaggcaagccacaaactggaagattttgaaattcatatatccaagaaaggacatattcagaaaatgtaaagctatcttgcaaacaaataagaaaaggatgtaaaacccaattgcaaaaatagccaacatcaacaggtaaaatttttagttacacaagatgaatatgttctggagacctgctatacagcatagcacctagagttaacaatactgtattgcacacgttacaatatattaaaaggacagacctcaggttaagtgttaacacacacacacacacatgcacacacaacaccacagagagatttctggaggtgatggatatgcttagtaccttgattgtggtgatgatatcctgggtacatggatttgtccaaactcatccaaatgtacacattatatgcaatttttgtatatcaattatatatcaataaagcttttcaaaatgggctaaaaatgggcaaaaaaataaagataatatattgatacagtcaactgttcttaccatccacatctcagactttccgggaaggcagatggggtaggggaagaaacagtaacgctgattcatttcatcttgggcctctcttgatttgctgcccaaacaatacatgctggacttgcaagctgtaccagaaagcctggaaagggagggaaaaaaagaaacacccttggacaaaacctcagcagccaagttgagactctgagccatatgcatgtctttgtgtgggttgaaatctattttctctgggttcgatggattattataacacccaaagttttccaaaaaacgtcagacaaggttaccacagcaattaagctgtctgccatctgcaagaggcttggcttaaggtttactgaagttaaacatgttttgaaaagaaaaaattaaggctgtcgatgttttgcctatcagtcaagctcagcaacattaggccttggagactcttcagggagagtcgttctccctcaaggaatagtttagcattggcatgctgaaatttcagaacccaaggaacatttcaaaaataaattatgccttgagaaacactgcacctaatcttggaactggcagagtaaaaactttgctaagacattcagccaagcaattgagattaacactctttatcgccttcccaaatggcaagttatttaaaaaaaaaaaaaaacagacctgaatgttaactgaatttcacattcttactccacagtttctttaaagcaaataagtgtctaaaatgatgacagtaaaacttatggtttaaaattctgaggagtgtctgcaaagtcttatatttttctcagccagattttctggctgaaccaaagctttcctgagaaaaggaggagaaggaggatgggttccatgtgcctggaaacattatcattctttccagttgcccatctttagcccagggttactttttattctttcttgagaaaaaaatattccaggaaccaaaaaaaacaaaaacaaacacaaaaaaacatagttaaattttatcctctgaacaacgggcaggggggagtcaatgtcatttttctccgggaatgaatgacaggaggttttctcatcttaaagcagtgctgtgctggcaaaccagctctctgggaggaaaaacaaaatcttcatttgtagcatttgccaatttccaaagtgtaaataatcccaccatggctaatttgaagttctcagtcatttaacaaccagatctcaaaatttccaaatattcaacaatcctttctcagaaactagcttcaacttaccactctcttgaagcaaattattattattgcccatgacatgttttatttatccaatatataaaaataactttacctggcattggaatgcaagagaaaagacaaatgacagaaaggggctctgccattcagaatcctacaattgaacaggcagggaaaatacacagtaaaggcctctgagaacacagctgcatatactacatctgtttggagaattctcctctcttctgggcacagcctcttaagacagcccagataatgccaggcattgaaatggcactgtgatagtggagggggtcaagcgttagtatggacagaggtaatgtggatggacaggaaggttcttatacatctataagaatgtcacttggaataagagttaggagttacttttttttgctccaaagctaacaactaggtctgccggatataagacataaggaagctgatttctgctcaacataagaaaaatgtttctgtttttttgttttgagacagagccttgctctgttgcccaggctggagagcaatggtgccatctcagctcactgcaacctccacctcccaggtttaagcgattctcctgcctcagcctcccaagtagctgggattacagtcgcccaccaccatgcccggctaatttttatatttttagtagaggtggatttcaccatgttggccaggctggtctcaaactcctgacctcaaattatccacccacctcagcctcccagagtgctgggattaccatcataagccaccacacccggccaagaaaaacttttccagaaaaaaaaagttgtgctgtcagaggagataagaccatgagaagaaaaataacctcttacaacatttctaccagttgatactatttcttacatatccttttgtccaattctcacaatgacctcatggtacaggtactggccactcctttatagtgaagaaactgaggcacagggaaggcaaaaaactaacttctctgaggtcttctacagcaggagcaggactcaaactaggtctcctcattcaggtaggattttttccctctctcaaaatgattcagaatatgccctgaatttcagcgtgttccttgaaagaggaacgcctggttacggaaactgaagtgcattctgccagtagcacccgggccaggcactgcactgggggattgaactggacacaggaaaccactctgtgctactttaggtttctagataagggcccggtgtaaataaaagagtgttctcctgaagatggtcatattgacctggctaatttctgagagggacattaagagtcagtaagggacgtgcataaaccaccttggacgcactatgataggcacaagaaggaacagatgagtctaccagagatggcttggaacaagtttatcccactcctaggaaaatgtcatggcaaatactctgtatattcagctaaaattcatcaaaaatgaaagtcattgacaaagatcttagaacacagctctcaggggaacaatgatttcttctgtaggggatcattaagggtcattgcagattcaagaagtttccagaataaggcaaacattccttcaacacagacagggtccatcacagaccactcagccacctgcatcccaagctttgcacataacccaggacacagtgagaccagacgctgggcttggacattgaatgcactgaatgcattctcatgagtcactattgcttcatagatataaattgccctctgcagaccataagacctgaacacgagaagactgttcaggtagtgttttttagctgccaaaggcacccccaggagggataacagagcagatgtcagatgcccccacgagtgaaccctgaacccaagacgcaccaggccagctcagccatgtggtcatttccacaggtctctcctcccctccccacactgccgacccccctgtgtgtgctgggaggcacagccccccttgggaggttgacattccaagtcagtgagtaccacagccaagcttgccaacctcagcacagccccctgccagggaactgtcattctaaacaccatgcttgggatgggacctcctgctggggcctgcccctgtgctccacccgcagcctgtgaggtagtgtttctacccaagggttgagtgttcaatgagtgtcttgtcctttcaacaatagcagacgtgttaccctgcagcttggggagctctgggcccttcgtgagtggaaaatgaaacctcactgtgaaggtattgaatggcctccaaataacacggcaggaccagcccagaaagccagagtgttttctgtgcacacgtcgtgtgacccacaaccagctcccaggggaagtgagaaacccataccacactttgccccggaatgatgttttccatctctctggttttgggcatctggagatgatccctctggtgccttgctcgctgaggacagtgcagcaggaatgagccacccatgcaggccaatatgccatcaatcaacgtcaatattattcctaagtctccacccccaccaggagtggtgcgttccagcccctgcggaggcagcagagctgtcagaacattgtcaggctttgtggggagttgtggcagctttctacaagccttaccccaaccctggactccagcagggctgcaccgcatgtttcctgaggatgtctcagaagagttcagtgcctctcctgcaaggagcttgacctgggctcaagatgctgcgacctcaaccctccaggtccaggctcaacagcccagcactggagctgactgtggatttttcatgcatagcacagcttcacgaggacctctgggcccctcacgcacaacagcccacccagggtctttcctgctcccaactctcttggaggcccatgccaaagacaagggctggggatgaaggacagaggccaggagcgcctccccaccacacaccacattaggcctaatggaatctcctcctccttctccaagttatcttctcttccatgcagcttttcccagtccccagagtcactggtccttgggccactgcatacttccagtgcaattatgcatttattgcatttgactttttttagtagttactggttgcaatggttgattttatatgtcaacttggctaggccgtggtgaccagttgttaggtcaaacaccagtctagacgttactgtgaagatatgttttagatgggattaacatttaagtcaacaggctttgagtaaagcaaattaccctccataatgagagtgggcctcattcaatccattgaaggtcataagagaaaagatggaggtccctggaggaagacggaattctgccaggcaatcatcttcagacatcaactcttccctggctctccagccaatgggcctgccctgaagatttcagacttgccagctctcataattgcatgatccaattcgttaaaagagagagagagagaaaggagagagatatcctatttgttctgtttctctggaacaccctaatatgctggtagacatatgggctccccaaatggattgtaagtcatgcagaggccgaaactgagtttcctccacttccatgaccccagcagtgcctagcccatagccagccacagaatggaccctcagtaaacgcatgctgagtggacagcacatggtctaggccgggaaggggtgaggtgtaggaagcagggaagtgcagaggtgcacaccctgaatgtgagggcctccttgagtttgcagcccaggtcccgggccctgcccgtgtggtctgcagggagaagtcattggtctacatgcaatgaccctgccggcctctgggactcacactccgcaagctcaagggcctggttggcaccacggaaaaatcttgaagcgctcacttggcgtgaacaaggtctggggttcatgagaatcagaaccttccagaaccctgggctgtgcactgttatgctgaaaggctggtgctcattttggaccgtcaagcgcagccatgagcagaaggaatccctccgagcatcgtgcccagatggcggctcagcctttcccttgtaacgcgtggcccagaggaaggggccggcgttgttctgccacagggctgttctgccacagggctgctcccccaggaagccctaaatgtgcagactgtgtgggaggaaacagcccccttggattactgggctataaaacttcaaatgcatgaagactttgggtggtgatcaaaaccccagcgcaccccaggaccccaccatgcaaagctcgccccaccagatagtccctgaaggtccttgtttgtcaatacacagcccctggctgggcctcacatcggcccagatccttcctggagctttggtttttcttgaatcctcagcagtccccaccctgctgctgttaggacagaaccgccaagtcaggagcaacagataaaagggcttcccctgccctggtccctgcgctacagtgtaggctgagccagcctcatggcctgtgcagcatgtcaaagacagcatccccatttcgccctgccctcccctcagcaccacaaaatacacaaggcccagaagaggagtccaaatgccttctcgctgtcccatgttcacacggacgctgcttaaggatttaagtacatctcagaacacaagaagccatgagtgagactcttgctttgttcaaaaagctgtgtgatgtccacacaaaacggaaaacaagtacgggctgccagctccctgacagggaccccctccccatccacggagataaaacaagcaatcacagaagtggctggacctacgagcctcttcatcagctgacaaaatagctctgaggaacccaggagcgtcactgggtgtattgggccattcttgcattgctataaagaaatacctaaggttgcatcatttataaagaacaggtttaactagttcccggttctgcaggctgtacaagcatggcgcagggcatctgctcagcttctggggaggcctcagggagcttttactcatggcagaaggcgaagcaagggcaggcatgtcacatggctagaacaggagcaagagaaagaatggaggggaggtgtcgcacacttttaaacaaccagatctcccaagcactcactatcacgaggacaagaccaaggagatggcactaaaccactcatgagaaatccgcccgcatgatccaaccacctcccaccaagccccgcctccgacagtggggattgcaattcaactcgagatttacaggagacgacatccaaactattctgctgggggtggtgtgcatagcagggaaggaaggtagcgtggatgcagaggtcccagcagggtctcggatggggttggaaaggcctgttctctcccctaggagtagccaggacagaccaggcctggatgggacctggaagacacctcctggttcccattacatttgcattgctcagccaaagaccacaggctgggcagggacctcagggttctcaggaccccataaaagagaaggcggaggaggaaacaacctctgtgcacacccacagatggggcctcggccagcatccaggccagccccgccatggggaggcggcttcagtgccagtcagggtgactcccagcagctctggagccaggccctggtagacccctgagcaaaggctgccctccccggccctacccagggaaatgggtggagggtggcttccccacagagagaagtacctggaacaaaaagggattgagggacaggggctgtgggccctgtacacactagaacctgctgtcttcctgaaactcacccgagggaccccacattaggcctagtcttttacccaatacccagggagacaattccagctacacccctcaatcatcccagcagaatcacggtcaagcccgcagggaggtgaccaggagcacagtccctagtgagaggaaagagccacagaatcaccttttcctgaggaaacagaaccaagctagggcagcgaaaatccatagtgaacacgagcgacgcccccagtgcgagaacagaggatttgggaaacacaaagcagaagcaaacagaaagaagaaacacttgctgatgctagatatgaaacagaattgatgaaataaaggacaggagggatgggctaagaagcaggacagacccattgaagagtgcactggggggtggggcgcggtggctcacgcctgtaatcacagcactttgggaggtcgaggctggcggatcatctgaggtcaggagtttgagaccagcctggtcaacatggtgaaaccccatctctactaaaaatacaaaaattagctgggcgtggtggtgggcgcctataatcccagctactcgggaggctgaggcaggagaatcacttgaaccagggaggtggaggttgcagcgagctgagatcatgccactgcactccagcctgggtgacagaccaagactccatctcaaaaaaaaaaaaaaaaagagtgcactgggggtccggggtcaggaagggaggagaagccgaaagggcagaacagtcaggtgaggcagagaacaagaggggcggcaacagctccctaaagggagagagaagcggaaaaagggcacgggggagaggttgctcaagaaacaataactgaaagtctcccaaaactaaaatgaaaaagtcacatgcatttataaatcctcagactgacaggattcatggggcagtgaacaggacaggcagaacccacgccagccaggcagcaggaaggaagagcaaagaaaaacatgagaggttatatcttccaggagaaaaagtcggtgacctgctggatttgtctcctaggtcttccagaacaaaatgtggcactacaaatgggtgacttaaaacagcaaaaatgcattctgtcatggttctggaggctacgaatgcaaaatcaagataccagcagggccacgctccctcggaaagctctaggagagattccattctatgcccctcgtagcttctggttttgccactgtcctcaacttgtagacacaacactcccagcttctgcctccctgctcatacagccttccccctgagtgtctgcatctctgtgtctcttcccctcttcttagagggacatcaatatgttggattagggacccagcctactccagtaggacctcatctcttaactaattacatctgcaattaccctagttccaaaggcattaggatttcaacatccttttagacgacccagttcagcccaccacacctacaaaagaacaaaaataagatttttatcaggcctttcaataacaacaggatacaagaaaactatggagtcataccttagatattttaaagaaaagcattttaacttagaacagtgcatctggttagattattatttaacacaaaaaagtaatagctccgggctcatatatagatggtttcaaagaacttgttccataaagcactatttgagaaaattcttaaagggtttcctctggcagaagaaaaaagacgaatccaagaaaaagatataagtaaggatcagtataaagttagcgaaagaaagttttgttgtcaaaattagcaaggagtcaaaaatattaggttctcagcagggcttcagcatggctaactgcaggcttctggtactcaccccctccacaacaaagaccgaaaatagcgagtagatggtcacactctgaacagatcatctaagagaacgctagaattcaacagagagtgaaaagaaacacctaaagccaggaaggcgagaaaagcaaggcagcctgcttggcaggggtcagctgggatcctggagaggctcccagtgcagggaaagggtgagtgagtgacccccagaggtccacacttccactgcagactcctgcatcctagccacgggaaagcccctagactctcacagccccaaagacttatctaggatgctgcctacagaccatgtgatggctttgctccagaggggaactcgtgccaggtcccacctcacccccaccctaggcagctacagcagggtgtcacaataagagcctagccctcaccagactgcatcctggacccaatagcccctggatctccacatccctggagccccactgacatcccctgcccacagatgctaccatgactgacggctgcccccagggctgaagtgcgagtcagtaacaaagagcccactgcccctggcagtgatgctgccacgcattttcatgcaccttaaaaacaaacccccctgcccacagcagtcacagatgccaatgcacacgcaaagtgtgcactcctcagccacctgtggctgctgccactgaaagctacttagccctccccagaagcagggctgcagcacatcttgggcctggggatcaccccacctctgcccaccacaacgaggacctgcaagcaccactgggggtctgaggacaggtccacccagcctggctctgcacccccagtgtccaggcatgccaaccagaggactgaggactgcctagcctagtccccaccgctgacacctgagccctcctcccaggggcttcaagttaggcccatccaacctgccatccctgcaacagtgggcacccacctgcacatgccacatgcaggcctggcaactggcccacctagcatgttgtagccaccaccaacaccagcacaaactgcttgggagccagagatttgtcctgccactgctactgccatcacccacactatgcttgttgcctaggggccaaagaacctgcccacctgcctggcccaccactactggtatctgagtaagctgcctggagtcccaaaaatcagctctctttaacctgctaacactggcgccagcgtacacatccctgaagccgaaggacaggcacacttggcacactgctactaccactgggacctgaggacaggccaacctggcatctttcccccggcaaaatttgaccacagcctccactaataaccacatcctaagccactgaggaaatcaaacaccactgacactgttaggccaaagaaatcacacagaaactatgctactgtacccacaatcgaaaccaaagtgccctactcaacactacagatacatcttcagaaaaaagttcccacccatgaaagcaaattcaagaaattggaagaagtgactgttacactagatgtgcagatatcaatgtgaggagaaaaaaacatgaaaaagcaaggaaatataacaccaccaaaggaacacaataattctccagcaacagatccaaatcaaaaagaacttatgaaatctcagggaaagaaattcaaaataatgatattaaagaaggagagtaagatacaagtgaatacagaaaaatagttcaaagaaatcagaaacataattcaggatatgaatgagaaattaccaaagaaatgagtatcataaaaaaaggaccaaataaaaattctagtaccaaagaatgcattaaataaaatataaaatacatttgaaagcttcaacgataaactagatcaagcagaaaaaggatttcagaacttgaagagaggtcttttgaaataaaccagtcagataaaaataagaaaaaagaataaaaatgaacaaggctaggccaggtgcggtggctcatgcctgtaatcccagcactttgggaggccggggcgggtggatcacgaggtcaagagttcaagatcagcctggtcaagatggtgagacaccatctctactaaaaatatgaaaaaaattagctgggcatagtggtgggcgtctttaatcccagctactcgggaggctgaggcagagaattgcttgtgaacctgggaggcagaggttgcagtgagctgagatcacaccactgcactccagcctcggcgacagagcaaaactctatcttaaaaaaaatgaacaaagcttacatgacatataggacactataaagtgacaaaatattctaatttttggtgtcccagaaggtaaagagaaaactaaaagaatagaaaacttatttaacaaaataagagctgaaaaatttcccaagtttagcaagagatgtatacatctggatacaggaatctcagtgacccccaaacaaataaaatgcaaaaaaaggtcttttctatgtcacattatagtcaaactgtcaaaaatcaaagacaaagagaattctaaacacaagaggaaagcatctagtcacttatgagggaacctcagtcagactaacagtagatttctcagcagaaactttataggccaggacagtgtggaataatatattcacagagctgaaagaaaagaaaactgctgtccaaggaaatgatactatacccagtaaagtttttctttataaatgaatgagaaataaagtctttcccagacaagcaaaagctaaaggaattcatcaccactagaccattcctacaagaaatgcttaaggcagtcccacatttggaagcaaaaggacagtatctaccataattaaaatacacaaaaatataaaaacccattggaaaagcaaacacacaaataaggaagagcaaagactcaaatattactactacagaaaattaccaaaccacaatcataaataagagagaaaggaacaatggatatacaaaacaatcagatatcaattaataaaatgacaggaaaatgtattaaccactccacttaaaagatatagactgaatgaatttttcaaatgatccaactatatgctgtataaatgaaactcatttcacctccaaagacacatattgacctaaagtaaagggatgaaaaaagacatcccacacaaacagaaacccaaaaccaagcaggattagctacactcatatccaataaaacagactttgagtcataaacagtaaaaagagacaaagaaggtcattatataatgataaagggatcaattcagcaagaagatataacaattctaaacatatatgcatccaacactggaccaccagatatataaggcaaatattattagatctaaagggagagatagactttaataaaatgatagtcagggataggactgagtggcttaaggtgggtcagtgagtttcccagagcttcaagcttttaagtggaggagctcagagtcaagcccctctcccagctctgcaggcctcaaatacaaccaccatcccaccagaaacaggtcccccttggctttgatgtaccactgagtttgaggggctcctgagacccccagacatctcttcaagcaacactacatctgaaagtcacacatctgagaggtccttaggggtatcagtctcattggagacagtgacagaagctggagaaaggctgggagtgcagccccccagcaggaggtctcaccgtggatgggaagagacctgaaccatcttcaaatactcttacgtgtcccattttaagaaaatagaaccaacgtgtttccagcaaattgaacacacatggacattttttaatgaactccagtcagcccatctgtcaaaactgaagatgctggagaaacctaagactcctctaaagttacagccaaaaagatgtgatatacctccaagaactgcacaagggatgctgctagcaacacttcagtgttgtggtcaacaaagaagtggagtagaggaggagtttctctcttgcccttccctgcgaagatcgctttccccagcatcgttcccaaaaatagcagccgagcttttaaaacacacacactccagatctgtgctcctgggagagcttgttcaactcacatcctgcatgtacacagagctctaaatagagactcctaactctataaaggaattccttttaaggaatccacccaaatctgttaataaccaatcgtagaataaacaccaaaggatcaagtgtgtgtgtgtgtgtgtgtgtttgcacgtgtgcacgcatgcacatcagtgcatctaagtgtgtatgggggtgagggaccttctccttccagaacctccctcctcccacttgtcctgccactgctactgcctactctgtagcataagggcctgcagaccaacaggagcccaggcagcaaatatcactcctgagggcccagataagacgctgtcactcaccacataccaaagaaaatgatatatatataatatacataatatattcaaatatatacaaatttgtatttgatatgtatacattaattttatatagtgattatagagatagatgatatgttatatatattctgtttcactgtgcttacactattttcactgtagaaaagggacaaatagaggctgcggcaggacggaagggtcacttgcttttacactgtgtaactttttgtggctttgaattttgtacttgaaaaaattaatttgtgtgtgtgtgtcctgcaggtaaactgttgtcttctaaaaaatttctgcttgacttcctaatctccagcagggaccaaaactttttcaggagctcagcaagccctcccctccccacccatccccaacacacatgtactcacacacatgcatgtcacacacccacacaacacacatgtactcacacacatgcatgtcacacacacacccacgcaacacacatgtactcacacacatgcatgccatacacccacacagcacacatgtattcacacatgtatgccacacacccacacagcacacatgtactcacacacatgcatgccacacacccacacagcacaaatgtatgaacacacataggccatacacaccagacacacacaccacactgacacacacacacacacacacacatgcatttgtcaggaaagagcctttcaccacccgctgagacccctcccgcagcatttctgagcccaggtgcagggcagggctcagctggccaaccaggccagcatcaggtcacaatgaactcgcagcatggataggaaaggcccaagtcctctaagcctcagaattcagtgccacctagaggctcctctgttgcatgatttctcaattctgagtgaaaagacaggcccagccactggcctcatgaaacaggaggtggtcccatgagcctgtaatgtccaaagaaggcactcatatttcttatgaggacttgagagattggggctgcctgtccgagctgctggccaggtccccaagacctggaagtgctcagtatcccctcgcaattttgccactctactcagagtgcaaactggtcaatcacttctggaaactatctggcaatatctatttgagttgagcatgtgcagcccctcggcacagcagtcacactcctgatctatacccaacatatatgtgcatataaaactcctgcccaccccagctcactgaaataaggcccctgaaaatcccagcccctcagctgggccattcccccttgcagggaaagggctggaggaagctgggagctcatgttgctcccaggcccagcagcatcgcaagtgtggatggctccctccatcctgccccctctcggtccccaccctctgaagcagcggttcttagccagggatgattttgtcccctggggacatttggcaatatctggagacatttttgcttggcatacccggggaagaggatgtactggcagctggtgggtagaggccaggggttctgtgcagcatcctacggtgcattgggcagccccacgtgaaggagcatccggctccaaacggcaatagcaatgaagccaagatattgtgccttaagttctcaatggcggaagagtgggtgtaaattattacttattttaaataattgggcatttcagctaaagatttagaattaaaaaattctattacaggagaattcagttctaaggcagatgcatttatcttgcattttaaaagaacaaagctgcctaatgaaaacggcagagtgagaccatgcacttcctgggctttagatgcatctttttcccagcctgggaagctgttccattctccagcgaacaccacttactacctaatgactgttcccccatggacctgtgagtgcactgaaatccaaagttcttatgctggatcactcaaagggataaaaatacatttctactcattcttttcttccctaaaggcaatgtcttgtttatccttccttgtctctaaatagataatttaatcaaaatgaactagccagatgatctacaataatcaacattagctgtgaaaattgtttatggaactactcgctacccagcacagatgtattcacatttccttcatagtgcctggattctactagacatcacagaagcacattccctacaaattagtgattatatatattcattgttttttttttgttttgttttgttttttttgccaaatgctttctagattgttgccctatttgttgtttaagaaatgctgacccttttcacaagacagtgctgaaagcgaagaaagaagttcctgcccctcctaaagccaaagccaaagcaaaggctttaaaggccaagaaggcagtgttgaaaggtgttcacaaccacaaaaaaaagaagatccacacgtcccccaccttccggcggcccaagacactgcaactccggaggcagcccaaatatccttggaagagcacccccaggagaaacaagcttgaccactatgctatcatcaagtttccgctgaccactgagtcggccatgaagaagacaggagacaataacacacgtgtgttcatggtggatgttaaagccaacaagcaccagatcaaacaggctgtgaagaggctctatgatattgacatgatcaaggtcaacaccctgatttggcctgatggagagaagaaggcatatgttccactggctcctgattacgatgctttggatgttgccaacaaaattgggatcatctaaactgagtccagctggctaattctaaatatatgtataccttttcaccataaaaaaaaagaaatgctgaaggctcctttactgttttatatattaattcaagttgttcaaatgcaatccaactaaatttttaatttgtctcactgttctcctcttaaataattaagtattatcctttggaaaactgagtttgataaaagaaaccaaaatccaacaactcaaaatatctcagcagaaaccaacataaggaatcagtataatcctcattggctgcccccagagtcatttaggaaatcaacctcaaagtaaatgtaatcaataatttgctttaaattcaaaaagatgtgtacatcacaaactaaaattccaaacactatcagaaggtatacaataaaaaaggtctccctgtcatctgatttcccaatctccctactgtcaacagtttttttgtgtgttctttcagaaattctttacacgtacaacaaacaatatatattttgataaattatagttgtgctatatacacattgttgctgctggttgctttttcttccttttttcctgtggtaaaatgcacataaaataaaatgtaccctcttaactatttttaagcgtatagttaagcagtattcagtacattcacatatttgtacagccatcaccattatccatctctggaactttttttatcttgcaaaattgaaactctgtacccattaaacaacttcccatatctctctccctccaccccctggcaaccatcattctttcagtctctatgaatctgactactctagatacctcatataagtggaatcatagtgtttgtcttttggggactggcttatttcattcagcctaatgtcctcaaggttcattcatgttggagcgtgtgtcagaatcttcccttttgaggttggataatattccattgttacatgtagcacacttcgcttatccgttcatcactgacggacacttggattgcttccaccttttggatgttgtgaataatgctgtaaatgtggtgtacaaatatctcttcaagaccctgcttccaattcttttggatctatatctagaagcggaatttcttgattatatggtaattctatgtttaatttttttagaaactgccatactgttttgcacagcagctccaacaagttactttcccatcaaccatgcacaagagttccagtttttccacatcctcaccaacacttgttattttctgtttttgttacagtaggcatcctaatgggtgtgaggtggtatctcattacagttttgatttgcatttccttaatgattaatgatgttgaacatcttttcatgtgcttaccagccatttatacatcttctttacagaaatgtttattcaagtcctttgcccctttttcaattgggttgtttgtctttttgttgttgatttttagtcctctatatatactggatattaatcccttctcaaacatatgatttgcaaatattttctcccattctatgggttgcctttttactctgttgaaagtgtctttttgatgcacaaaagtttctcaccctcatggagtccagtttgcctattttcttcttctgttgttcatgccttttgtgccttatctaagaaatcctcaccaaatccaatgtcatgaagattttgccctgttttcttctaagacttttatagttttcaaagacatttaggtctttgatccaatttgagttaatttttgtatatggtgttagaaaaggtccaactctattcttctgtttgtggagatccagttttcccagcaccatttgttgaaaaaccgttctttccctgttgtcttgttgatctgtccatgtgggcccatacagaattccctcattcctttcatggctcagtcatattccatcatatagaggtaccatccctttccaacctgtcccctgctaaagccctaaattcctttctactgtgttgattttgtaaaaatgatagagtatacatttttatttatgtgcagatgtgtgtgtgtgtgtttgtatatatacacacacacataaattcttggaagtaaaattcttggcataaattatttgcagtaaaaaaaaaaaaaacaaaaaaaacagattattctggctgaaaaggcagaatcatccaacccaccaccagataatccatttgtgttttttaaataaaaattcattgtaataaaattgaagcagtcaagagagacatgaaatgaaaaatgacattttcacctcagccccagtcattctacccactggttaacaattccttgcaatttccttccagaaagaaatgattatgcatatactcagaaatatgtacttgtatatttttatttgcatgagtaggcagactatagacattactatacatcccaaatatattctagtactctgcttgttttgtatgtgtgtgtgtgtcttctggaaaagttacacataattagctttctaccaacagaattgtatattagaaggaaagtttccttacgccagtgtcatcatgggaaaccatcaacattttaacattgacagttagataggtaaaaagtatgtctcagagaaaatagatattacttttcttaagaataatatggtttctgttctaggagccaggaggtgggaggagaacaagatggaaaaactttccatctttttatacttattttcttgtgaagggtctttatttgtcttttgcccagtttttattattttattgctttttcttctggaattgtatgttttatttcttatggaaattagttaggctagctgctataacaaaaatagccaacaaaatatgtgtcttaaatgaaataaatggttgtttctctcacctatgacagtctgaagtgaatgtctcatactgctacacatggccactcatatgatacactaaaatcacattcaggtacccaggttccttccatcttatttttccaccatgactcaagatgttgttctcttccgcaatgtcaatactggggtaggggcacatctgtgttctagctatggagaagggggaagaacatgggcaagagtcataccaactccttcaaacccctggcccagaagtgacccacattgctctgctcatatcctatgggttagaatttggtcatatggccacatctaactgccaggacagctgaaagatagagtatagttgggctatgtattaactatctactctattctgcctaacaatattaccactaataacttagggcttaaaactaaacatttcttatcttacagaatctgtgagtcaggagtttggtttggctcaactgggtcctttgcaagatggcagtcaaagcactggctaggctgtagtctcatctgaggtttgactggggaaggatacactttcaagtccaggcaggttggcagaactcaattggactggaggcttcaacgtcttgccttgttatccatcagccctgccctgttatcctcagctcttagaagccctcagttccttgccatgtagggtttcctcaaggccaatggggagagagaaaatccagcaagatggatatgacaatgctatatatataattacatacacacaatcatgtcaatcctgataccttttccatgcactattgattagaagtcatatgtcctacccatactcaaggggaggaagcaacataagggcatgaacaccaggtactagggattgtgaaggccacccaagagtgctatgtaggcctctctagaatcccatgacaattaaagaaggaaaatagatttcagtggatatctagctgtcagcttccaccacaaaatgtgttgcaaatatttttcttagcaaagaaaaatgctcagaaaagtgctaggttgaaaattggcttcatactttaatttgatggttattttgtggttggtattttaaatgtgcttatggcattcttgacttacaaaagcttttagtttgtgtgaagtcaaatttatcaatattttcctttactgcttctggattttgttatgatttatggcatttcatgaaagacctcccctaagattatgtgaaattccacccatgttggctcctaaaataactcatattattatggccaagcatcccatttttcagaacgttttcttcactaccaggataatttgtttgtataaactattttgctgctgacttgcttgaaagctatttgttcacagttttgctcatcagtgactttttaaggtaaagaagtgggatttcagcaaattattttcaccctttagtttacaattcttagtacagctctaagataagcaataaaatttcatggaaagcagcttttttatgcaaaatcagcatcattcatgttgagtcaacgatacagttctttccagctctcttcgacctttcttctacaggggacacatttttgtggtctctctcaggtgtttgccctcagaggtcactctggtgctgactgtttccttccaaatacaaaacgatgattgtgccaataggatccatttacttacaatcacttgcctctcaaacaaaggctaaattatttggaaatcccaaagaaacacagagtttcttcttttccatcagcaaatattcagtgcaccttctacaatgggccaagcactctgtgcaaagtgggtagctgctggcaaaaaaaaaaaaaaaaaaaaataccccctttcaaaattgccaccaggaaaggcgactcatcttttagttctacagattctacatttgtgataatattccaatagtcttcagatgaccaagtagcatcaagaccttccagcatggtcacctagagcccttgtgactagactagacagaaaaaagatggaagggaggggaggggccgacccatgcatccctgcatcagccacagtttttcaatctgcaatacccagtgttttgccaggcccttcagaactgatctccataagtacttgtgtagcaggtatcagtctctgtcagtgaatggaggtgtgtgagaaattcagctctgtgcattcctccatagcatggcttaatttccaccataagccctcaccctatcaatggcagaggctaaagctcagtccactggccgagctgcagctgaggtttaggggacttgcctcattcttgccttggggaggggctgaggtgagccgagggggttgatatccatgcctgcccctctgaggagacctcattgccatcgatcctggtgaggcacccccactcccccattgaaggcccccacagtcctgaactgtctctgcatgtgctggcaatgggtccctcacatctgcctccccacccagtgtctgtgcacagctgttctttctgacagccctggaaatggaaagcctagacctgaccccagttgattctctttctgctgtcccatctcttccctgagacaaccaaacccttcccaagtgaaaggttagagggcaaaaagggaagcaccaattggcatttccaagtaatacccaccacgccagtccacaaggctggagggcaaccagaagattcagacccaagacacaaatggaccatcaaccgatcatagtgcaggaaaggccttcttaaaaaggaagctataaattgctccttaacactgcaaggcaaggtaagccttgatttagataagtatgattaaagcagctttcaggagacactaaaagcttatgactttaattataatacaggctcatattaacaaagacacccaaaataatactgatttaaacaagaaaaccttttattttctcttacagagctgcacaagttcagtttccttctatctccttgtcctgccacctaggctgcaggcctgcaggtaggagtggggaaaagggaaggggcctgttcccctgggggccacaacccaaaaggtgcctgaatgctttccttccctccccggggccattcctggccacaagggaagatgggaaaggcagcccttatgttgccgaaaactgtggctgctttaactacagagaaggaacaaataaagattaaagaacaaggagcaatatttgtcactcttatataataaaacagctaaacagttctatatccattctccaatgcccagctccagcatcaccaacaccgttagttctctgaactaacagtgattccttccatctccaaactttatctgtaccattcatgtgatgattaccctcacatggcctgtctcccacaggctgacccctgaatctcctctacatccagcgtgacagcgcccacctccgctaagggggctccgctttcctgcctagctccttcagtttcttgccgcgaaaatggtctttgtattgcactttgtggctgacagacaccgtccgttacctctcagcattgtttcaatacacacacattaacacacactcgcgcacacacacacgtacacactcgcacacactcccacatgtacacatatacacgcacacccacacatgtacacagtcacacacaaactcactaacacaaacatgtatacattcactaacacacacaaactcacgaacacgtgctaacatgtacacactaatacactcatacatacacacgaacacattcacacacacatgcacattcactaacatgtacacactcacacattcacacatgcacacctactaacacatgtatatactaacacactacatgtacattcactaacacacacgtgtacacacacgcactcagtaacacacatgcacactaacacacatgcacactaacacatacatgcacattcactaacacactcacactgtagcaggacaagctgcagacaaaacctctcagacactgagttaaagaaggaagggctttattcggccgggagcttcggcaagactcacgtctccaacaacagagctccccgagtgagcaattcctgtcccttttaatggctcacaactctaagggggtccgcatgagtgggtcgtgatcgtgagagggtcgtgatggattgagcaagcagggggtacgtgactgggggctgcatgcaccagtaattaggacggaacagaacaggatggggattttcacagtgcttttctatacaatgtctgtaatccacagataacataacgcattaggtcaggagtcgatctttaactaccaggcccagggggtggcaccgggctgtctgcttgtggatttcatttctgccttttagtttttacttcttctttctttggaggcagaaattgggcataagacaatatgaggggtggtctcctcccttaacacacatacacactaacacacacacatacacatgcacacacttctttactaacagagccccagtgtgttccgaggcagtggagaggacgcccctacccagcactgtggtgagccatgattggtctagaccagatgtggccatttgttttccctttgctgtccagagatggccacatgacccatgtctggctagtgagatgtaagtggatgttctctgcagggaccttctaggaaacctcttgcttttgcaccaacaggggtcagcctgggctggcatcacctttcccctacctttccccttcctccagcttcagtcttggaggtctcggttcctggaggtgcagctgcctctgcagctatgaggggatcaggcgaccagatggagattgtggaaccgaaagagcagtgggaccaggtccttgataaccttgttgagcccctgcagcatcccgggactgtccactccagacttctggacaaatatgaccattcaattattcagtgctagaaaagaaatgagctgtggagccacgaaaaggcgtagaggaacctcaaatgcacactgctaagggaaagaagccagtctgaaaaagctacacgctgcgtaagtccaaccatgtgacattcaggaaaaggcaaaactatggagacagtgaaaagtcagtggttgtcaggggttaaggggaggaagggataaataggtggagcacagaggatttttagggcagtgaaactgttccgtatgatgctacaatggtggatccatgtcattacacgtttgtccaggcccgtagaacatacaaccccaagagtgagccctgtgtaaactctggctctggtgaatccatgtcattacacgtttgtccaggcccgtagaacatacaactccaagagtgagccctgtgtaaactctggctctggtgaatccatgtcattacacgtttgtccaggcccgtagaacatacaactccaagagtgagccctgtgtaaactctgggctctgggcgacggtgatgcaccaatgcaggttcatccattgtaacaaatgtaccctctggtggaggatgttgataatggcggaggctgtgcatgtgtaggggctgagaaacctctgtaccttccactcaattttgctgtgaacctaaaacttctctaaaaagtaaagtctatgaatttaaaatatatacgcatatatatatatatatatatatatgactattcatgttatttgtttctgcctctgcagtcaggagacacttgcaaccatgtacacttccaacagataccatctgccttcctgccacttctcatccaccccattgtgaactcacaaaacacatcccaattccttcccaagctgaaaatccggaaaacaaaccacctgtgtccaccagcatgccactgcctctggtgcacccacattgccttcatggccctgacacggacttgggtttgatggacctgggagtcagttggccccaggccggatggcccccactcaggtcctgtgtgtgcacatgagtccaagagaccctgggctcaattctcagctgaaacctgaactctgcaggatgggtcagtcatctgccgcaggcatttgccaggcctggctcactgagtcataacgaggttagttatgtgactgtcagccctggagggcaggcagaggctgctcacatccctttgtggggccttagggcttcacgctggacctggacccacacaggaattcccttagtgtttctttttctttttttttctttttttttttttaagagaaggggtctcactgtgttgtccaggctagtttcaatctcctgacctcaagtgacccaccctcctcggcctcccaaagtgctgggattacaggtgtgagccacagcacccagcctcaaacggtcttttctttgtgacagcatccagtctcctagaatccagctcccagctatccatgaaaaccctcatggcctcggctggaagaagagagctggcagcagatcagacagaaagcaccagacagaaccctaaggccatcacctcccacactcctgagtcagcagaggtcgcagataaaacctgcctggagagggccctctgcctgtgggctcttagctctcagctctcagctctgcagcctggaaggaaacccaggaggtgtgagttgatgattgcagagaagagagctgggaggtcagcccctccaaaggtgcctgcccagagcgcgtggggtcacatatggaaaccatttctggggagggagagcgggaatctggaaatgaggccacaccagggggtccggccatgaatacaagaaggaaagccttgttgaagggaggcccatggcagacacagctcagtggaaggaggaaaatactcagcattccaacaacttctagtaagaaatcttaaaaaaacggagaaatccacgcgcttgtggttttaatcaatgcaacaacgcaacaggaggctggctcagagcaacgcgaggatgaggcagggcccagaacactgaggcctaaatgtggagcacaccagtgtggacatgaaaaactggcagtgtgatctgagaccactcagtggcccctttaagtggtgacaatttccacccagaagaaacgggtgacaattttgagatcctgattcaataggttccccacagatcagtttctcctcggagaacagaacctcctgaatcttaagaatattaatatctccagggctgaatgtcccagcactactgataaagaacagcctcttccaggaaaaggagcagttttttatctttgctaataaccagccagtctcataaaaactgggagggaaaaaaaatccttaaaaatatttacttaaaaaacaatcaatagacacactaaaaagctcatgcatactgatttctttgatgtgtttttaattgcttaagggtctttgtagaaaaatgagcaaagagcattatttatacatttacatatttagaagagagcaggttaaaaactccaacttcaccagcagcagcaaagaacctttgttgagcaatactgtccccttgtgtccaatcttcacttaatgctttcctaagttaagtacagctgcttgatgggacattctgcagtagtaaacgacttctacattttgctgccctttaagacttgcattcctgcaggaaacatgcatatgcaataccaattctaagtaaggggaaatctgatttaagaaaattggcctcaggtattcatgatggagttcacagcatgggaaaatgtgggccatcgatgtggtgaagaaagcctcacttccatcccagctttttcactgttccccacgagtaagtaagtgaacggcaaatgtgcaagggagttaaagtgtaaattcctcccggcccatataattgacttgctgaatttttgcagtaacaaaagactgctgttcaaaacatttccagtgacattttaagactacctataaagagaagttcgggccgggcgcagtgactcacgcctgtaatcccagcacttttggagccgaggcgggcggatcacgaggtcaggagatcgagaccatcctggctaacacggagaaagcccgtctctactaaaaatacaaaaaattagccgggcgtagtggtgagcgcctgtagtcccagctactcgggaggctgaggcaggagaatggcatgaacccgggaggcggagcttgcagtgagccgagatctggccactgcactccagcctgggcgacagaacaagactccgtctcaaaaaaaaaaaaaaaagaaaagaaaagttcgcgttggtcatttttgtgctgtttatgatgtataatcattggcactgtccccacagtgtcttaatcctgatattcagcaaatatttatccaacaggggtttacttatttatttttgagacagattattatttatttatttatttattcactcgtcacccaggctggactgcaatggcgtgatcttggctcactgcaacctctgcttcccaggttcaagctattctcctgcctcaacctcctgagtagctgggattacaggcaccacgcccagctaatttttgtgtttttagtagagacagggtttcgccatgttggccatgctggtctcgaactcctgacctcaagcgatccactcacctcagcctctcaaagtgctgagattacaggcatgagccactgcacccatccaaaccattgtgctcttttctgtatgcgggacttgggaaaggtgggacactctggagattcctgcctcaagccacattctcctctgcaagatggctaaaatattttgtgctttgtgaaagagcagaatctgttttgtacctaaggcctctggtctctaaatcctaaaatctctccgctggggtcccctgaagtgtctggtacttactgctcttctcgctgtgcctaattaagatgatctggattcgcatgacaggaacatatggtaattaagtaccaaaatctcacaaaagcaccagaaatcaaaaatagatttttctagtaaagtcagaattaaaatccctatttttttaagtcttcttaaagagacatacataccataaaagttctagcaaagaatttataaaccgaaatgtagaatgacttcacatataatctgcaaatcaggctgctgtgtgacctacttctattcccattttatgagtaggaaaactgaggtaaaaaaaaaaaaaaaacagggtttgagtactacttgcaagtcaccggcatcagtctcccatgtatacccacagtcagacgtcaccacagcctgtggccaccagctgcagaactccataatatttgtgagcccaaattacacagcaggtggccccaggtagaggggcacagcccttcatctagaggaactgcaataccacagggctggatgagctggctcaagattttctgcttgcaacgtggctgtgtactattatgctataggtgactttgtctgtttctacctgcctggagatacaggaaaatgctcatgcttcacacccagaaccctcaggagagccgcatggactcctcagagcctccaggtttccaaccaggtaggaggagactcagacatcttttgtgagtgagggtacccgatggaggggaggaaggcctagagagggatgcaatcatcctcatcattcccagttttctgccagagcctggggacacaggaaggcaggaagactcggggctatctaaatccaagttcaaatcctgactcagttactcactaactggtgatggatacattagttccctgatctgcagttttctcaatcatgaaaaggaggtaatacttagcttggagccaagccaccaagttaggggtggtttaacgaacagcaaaataaccataaaaacctcctgcacaatcttctatgtttgccccttccccatctgcagagaaaaaactctgaagatctgggggagggaagagctaaaacatgaaaaaagcctagtccctgcgtgactgtgtggagcagggtgtccctttttctcccccaccaccccccaaatcacgcagaaatacaacatgagcaaggaataacttggattgtgtcaaggccctgaaatttgaggatactttgttatagcagtcggtctagttgcttaaacacgagtgttaaacacatctaaaatgcctagagcttggcccatagtaggaactcgattaaagtagagcttttcccgacttgctgatgacaaagtgagcagacaaccaaccagcatttctgagagtgagaacatctctcacagaatctttccaagcctaggccactcccctctcaacctgttctacacgcctgaagtgatttctgccagccctgactgctgtctgtcccaaaaggaatagaactttctgaaatcctggaaatgttctgtatcttcactgtccaatagccttgtgaggctactaagcacttgtactataaatatggcaagaacctggaggaactaacattttattttaattctaagtaatttgagtataagtgccacatatgaccagcggctactgtaccgcacagctcagtcttagagaccacatggttcattacaagcatcagactcatcccaagcaaggacagcccaacgttaattaaactaagcagatcaagagctgccagatcacatgggtagtatccagaacgacctccatataagatgccaacacctagccgggattatggagttaagacaaatatttgtttttacacttttataaagcaaacagccctgattggacatcaacccaagttacagctgagcccttctctatttattaggtaattgtgtctaaactatgtttttgtttctctcttcattgttccatatgtcacatgcccacccacaatacacacacaaacacactcccatgagtcaaaccctacacgctcagtgctttgatgtttcagcctctgccatctgctctgcagctggctatcatgagggctgcagcttggagctgctggaaaatagaaacttgctcactgatgaagagattggggacggtctgacagcacggcatccttcatcagagccatggcctgtgtggccttcctgggctggctcagggcaggatctgcttctcagggactagagcaatggcaagattttactttctttaaaaacaactggttaccagctatgaagcagaaggctcttctctttgcatttagcaaagagtcattgatgctttcagcttgtcttgtgtgctaagcatgtatagaaactgttgcaggcagtggcatagtcactgttccaggtagtgatgtcttgaggacgagcagcacagactgggtgtccactttcgtgaacctttgtcctggggtaaggggcgggactgacaacaaacaagcaaacaaataatgaattcaaggcagcgattacaatgaaaataaagttggccagtgtgacagagaatgactgggtcaggtgggaagatcaaggtgctggaaggactggtgtcctctgtggcctctgtccttatgatatggtttggattcgcgtccctgcccaaatctcatgttgaattggaggagggacctggtgggaggtgattggatcatggagacagatttcccccttgctggtctcataatagtgagtgagttctcacaatatctgatcatttaaaagtgtgtggcacctccccattctctctctctctctgtcctgctctgccatggtaagacgtgcttgcttccccttcaccctccaccttgattctaagtttcctgaggcctcccagtcacgcttcctgtacagcctgtggaactgtgagtcaattaaacctcttttcttcataaattacccagtctcagctagttctttatagcagcgtgagaacagactaatataaaaaaattggtaccaggagagtggggtactgctatataaagatacctgaaaatgtggaaacaactttggaactgagtaataggcagaggtcggaacagttttgagggctcagaagaagacaggaagatgtgggaaagtctagaacttcctagagacttgttgagtggttttgaccaaaatgctgacactgatattgacatggtttggctctgtgtccccacccaaatctcatctccaattgtagtccccacatgttgaggtggggggtcctggtgggagataactggatcatgggggcagatttgccccttgctggtctcatgatagtgagtgtgttctcatgagatctgattatttaaaagtgtgtggcacctccccattctctctctctcctgctccaccatggtaagacgtgcttgcttccccttcaccttctgccacgattctatgtttgaggcctcccagtcatgcttcctgtacagcctgtggaattgtgagtcaactaaacctcttttcttcataaattacccagtctcagctaattctttagagcagtgtgagaatggactcataccttggctggcagatggccatgcccttgctgtttccatgattatccctttgtgtctcttcctcttcttacaaggaacgccactcatattgggtgagggcctaccccaatggcctcatttgaacttaatcacccttttatagactatctccaaatattgttacagtttgagctactaggggtcaaaacttcaacattatgatttttttgtgggggtagggggcacaattcagcctgtaacaggtttttagatagtatgtatttttagatagtagggaagaggagaagaagatcagtttgctgtggacctaagaatagaagacgtcaggctggcttctgatcctaacctcctgggggtaacttaagaacagatctgtaaaagcagtaagccttgcttctggtttgtcagcccagcccctgaaggcaatttgcttcctcatcccggttttttacccggagtggtaagtcatgcagacgcaacacggttcttcctcaccatcagggaaaacacaccaagggcctaaagaaacaggagtagccctaagcagtgcttccctttggttagatttctttataaaatgtttgcattttagtggccagcaccgaaagtttaagaaatggaacttccagatgcaccagagaaagaccaggaatgtggctataaggttcagataagcatgtgagatagcactcagagagctgctctttgtgaatgcagggtcatcaagatgctgagaacgaggtgctgtcagcagataccacacataaggcccaaagggtctcctcaagcacctagaacagcagcccagaggaaatgcactggtgaagattcccccaatcaggagaaaggagagagtcagacacactgtttccatcatttggggagatgttatattcaatttgctggacagagaggacaataaacaatcagatagagctggggactctaaaatcctaggtagagtctaatatctccactgttggatgtggcaagaaacaacaacaaaaaaaaaactgtttagaagtaccagtggggtagaaactgtcaaatccctcagctccactgcctttgcctcctgggcatagaacaagcctgcgtttcccatcctcctctgcactgggggagcacgtgtctatgtccagccaatggaatgagggaggaagtgaggtacagtgctgcccagcttgggacatcggcagattgtttgcaaaatggcttccataattcctcttcctgtttcctcccacacaggtcctggtttaaccatgtgatttgttttggccaatgggataacagtaactgtgttagaagcagaaattgaaaaaattttccaatttttttctttgggcttgccctcttttgtggctggaattcttctcctccatgtgaacaagtggaggctggcattctggaacaggaagcacagggacagaagcccagccatccctgctgaagccctggataagtgagcagattcattctagaccagccagcctcagctcagccagcctgaccacagcaatcacccaggaagtccacaaaattgtgagaaacattatgtatttattgttttaagccaccaagttaggggtagtttaatgaacagcaaaatagccataaaaaactcctgcacaatcttctatgtttgctccttccccatctgcagagaaaaaactctgaagatctgggggagggaagagctaaaacatgaaaaaagcctagtccctgagtgactgtgtggagcagagtgtccctttttctcccccacgcccccaactcacacagaaatataacatgagcaaggaataacttggattgtgtcaaggccctgaaatttgaggatactctgttatagcagtcagtctacttggttaatgtactacccacttcctagaaactgaaatctgccaacacacttgtggaatggtccatattcccagactaccgccactggtagctaagaagaatcctcatcctcaagacttgactctgtgcagcctctgtgtaactctcattcacttttccatacattcattcaataaatactaattgctaagaaatgccaatcacctggtgccagcagccaagacaagagtggtccctgtccttaaggcacttgtagtctagtagcaggctaaggaggggaggacagtcactaaacaaataatcccactgcaggctccaggaggagaaggaagccatatctattttgcatacaattgcatctgcagccctctgctcaatgtaaggcacaaaataagggtttaataagttgttgctgaattcataagcacaagtcaatatttaattacaaatgttgatacgaactgtgaaggaaagtttaaggagccaggaaagactataaaaggggggatcagaaaagttatctctgaggaagtaacacttaagccaagagctgaaggagggagaaggaaaggagggcagtagggagccaatgaataaatagtagagtgagagacgctttgaggcaagggaaatagcttaggcaaaggccctgaaatataaagagcctgctgctgagttagagcaacagaagaccagcatggccagaccatggtgagtgaaagaagtgggataagatggcgagaacagtagataggatctgttacatagatccctgtaggccaggttagatttatgttttaacagctttgttgaggtatagtctacatgctaaaaaaaaaaagcttatccactttaagtgtacagttcaatgagttttgataaatgtatactgtcatgcaaccaccaacacaatcaagttttagaacttgaattaccctcaaagtttcctttatgctcttttgcattcagtccagatccctacctgaccccaggcaaacaaaggtctgctttctgcctaattcagccttttctagaatttaataaaatagattgatacagcatgtagtttttatgcctggctcttttactcagcaaaataactgtttagattcatccatattgttgtgcgtatcagcactttttccccttctattgctgagtagtattccatcatatggacatgtgacatttagtttgttcatgcaccagttaatggacatttggattgtttctgctttttggaatgctactatatgcatttatgtacaagtctttttatgaatatatgtttttatttctcttggatagatacctagaagtggaactgctgggtcatatgataagtctaactatgtaagaaactacaaaactgtttttctgacaattttgcattcctagcagcaatgtttgagggttccagttgtcccacattcttgtcacaacttgatattttaattcattttaattgttgctactctactaggtctgtagtagtttctcatttgtggtcataatttgcattttctaaagaccaatggtattgagcttttcttttcatgtgtttactggacattcccatatcttgttttgtgacatgcctcttcaaatcatttctccatttctattgggttatttttcttattgagttataaaaagcttacctttttattgtttgcttttgaagtctaatgtatccattgttttcctttagaattcacgttttaattactattgtcagtttttgaagaaccatgcaaggtgattacagtggtttttttgttgctttattttacgttattttttatttttatttttggtccagggagtacatgtgcaggtttgttacatagatacattgcatgttgctgaggtttggtcttctaatgataccactgcccaagcagtgaacaaagcatccaataggtagtttttcaaactcttcccctctccctccctctcctcttttggaatccccagtgtttatttttcccatctttgtgtctgtgtgtacccaatatttggctcccactaataagtgagaacatacagtatctgtttttctgtttctgcatgaactcacttaagataatggcctctacctgcatccatgttgctgcaatggacgttattttgttcttttttatggctacatgctttttatatcttatccaaaaaaactcatcttatcccccaaatcatagattttatcctatgttttcttcttaaaggtttattatgtatctcttatgcataatttgtttagtttatttattatttattatttatttttttattttgagatggagtctcgctctgtcatccaggctggagtgcaatggcacgatcgcagctcactgcagcctccacctccagggttcaagtgattctcctgcctcagcccccgagtagctgagactacaggtgagcaccaccacgcctggctaatttttgtatttttaattgagagggggtttcaccatgttggccaggctggtttcgaattcctgacctcaggtgatccacccacctcggcctctcaaagtgctgggattacaggcatgagccacggcgccccggcaatttgtttagtttcataatccattttgaatgtattcttgtgcctagtgtgagatatgggtaaaggcttatttttcccatgtgaatattttattattccagcaccatttattgaaaagattatcctttttcctgttgaattaccttggcacctttgtcaaaaatcaactgaccatatatgtatctagttttagatgttctattctgttcctttcatctatgtttacccttatgacaatcccatgctttcttatttacaataggtttagagtaaacctttaaaatcatataatttaagtcctctgactttttctttttgcaattgttttagctattctttgcttctccgtataaattttagaaccagcttataatttctaaagaaattcttgctgggattttcattgggattgtattgaatctacagacaaatttgaggatgactgccatcttaataatattgagtattctagttcataaatatgatatatcccccattttatttagatcttttaaaatttctttcatcaatgtgttttagatttcagaacatagatcttgaacttctttttgttaaatttattcctcagtttttttgtttgaatgctattgcaaatggaattgttttattgtattttaggagtgtttactatcaatatatagaaatacaattaatttgtgtatattgagcttgtatcctataacctggctaaattcactcattagtcctggtagctgtttggtagatacattaggaatttctacatagataatcatgttatccactaataagacaattttacttctttccaatctgtatgtcctttatttctctctttctttattgcacttgctaggatatccagtacaatatgcatagacatggcaacagtggacatctttgtcttgttactcatcttagggagaaagcaatcagcctttcacctttaagttttgtgttacccatagctttttggtggatgctttttattatctacaaatcctctactatgagggacttatcttctattggttgtttgctgagagtttttgtcataaatagatgttgaattttatcaaatacattctcggcatctattaagatgatcgcatgttttatctcctttattgtattaatacggtgtattgcatgaattttatttctgggatatacaccacttggtgactgtatattatactttttatgtgttgctagattcaagttgctaatactttgttaagaatttttatatcatatttgtcttagtctgttcagctgctataacaaaataccttagactggggaatttataaacaacagaaatttattgctcacagttctggaggctggaaagttcaagattaaggcaccagcagatgtgccttgcaatgtttggagaggagccattcctcatagatggcgccttctgtgttctcatatggcagaagggcaaaagactccctcctcaagcctgtttgataaggacgttaatctcatgacctagtcacctcccaaaggccctatctcttcataccaatacattggggattagatttcaacacaaactttggacagacaagaacattcagactatagcagtgttcaagagggacaatgagttgtagttttcttttattgtgatgcccttgtctgactttgttatcaagataatactaacaaaaaatgagttgggaatttttccttccccctgttttttgagagactctgggtgagattagcattggttgttccttacatgtttgatatgcttgacaggactcacccataaagccatctgaacctgaacttttctttgtgggaaggtttttaaatatgaattcaatttttttttaattatagggctattcatatttctatttcttcatgaattctatttttttttttttttgagacagtctcgctctgttgcccaggctggagtacagtggtgcgatctcggctcactgcaacctccgcttcccaggttcaagcaattctctgcctcagcctcccgtatatctgggattacaggcgcccaccaccacacctggctaatttttgtatttttagtagagacaggatttcaccatgtaggccaggctggtcttgaactcttgacctcatgatccacccacctgaggctcccaaagtgctgggattacaggcgtgagccactgcgcccgactatgaattctattttctacttgttgtttgccttgttaggttttggatttacttaggactttgttatccctttcttccttactgtgtctcccttttggaatgagaatgtctgtcctatgcctgccctgccattgtatttgggaacacataacttgtttaatttcataggctcatatgtgcttcaggatgaatcatagtttgagtctcactcatatctgctttagatgatatttagatgagactttggactttggactttagacttttgagttaaggctggaattatttaagacttttggggttacagggatggaatgaatgcatttttcctgtgacaaacaaatgaattttgagaggcctggagctagtatagacccttttagggctctgttacacaagactgtcccatttcagatgtcagtcacaagtctgagcggcccaaacttctgaccaaccagctatcaatcaggggttcccacaaccccttccttggcttacataatttgctaaaactgttcacaaagctcacaaaaaggaaacatttgcctatgtttaccagtttattataaaaggtacaagccaggaacaaccagatggaagagatgccgaaggcaaagtgtgggggagcggcacagagctcccgtgccctctatgggtgcaccacgctcccagcacctccatgtgttcaccaactgagaagctctccaaatcccgtctgtttagtatttttatggaagcttcatcacacaggcatgaacaattaactcaatctccagccactctctcctccccaaaggacggggattgaagctaaaagttcaaagcttctcatcatggcttggtctttctggtgaccactcccaatcctaaagctatccaggagcccaccaagagtcacctcattagaacaaaagaggcttctatcacccaggcaaatcgaagggacttatgagctctgtgtcaggaactggggtcaaagacaaaatggtaggacagaagatgctcctagcacccttactattcaggaaatcataaaggttttaggaggtctgtgtcaggagcccagggatgaagaccaaatatatatttcttattatatccaaaatcacagaatacctccaggcaggaagcccacagatcaccattcttagcaaatgctgtagcagtttcatgagtaaactcttctcaaatgttgccttgtctttcatcattttctaatggcctgaaatgactgtctttaatcattttgtccattttttttacttactttctgccaagggaaatcccttgacttcctcatacaaccaataccagaagtagatcccccaggttttactccatctagaccaggaagccactaaaaggagtcaagctgcaaagtaccaggaatcagctttctattcctatgtgctcactgtgcctactgtgggagcgtcagttggtaggagagagttccagttagaggctttcagcggtaggtcccaggaagcaatgaaagagatacgttgtcaagtaactgaaaagtcctgtgcagcttgggcgagatattcatgacatccttcagaacagcagctctgaggtgccactggatctgtctcacggtactgtcttggtcctcaagccctcgtggtagtgagaggtctgtcagtagcttctagactctagaggcttcctcacttacatccaaggagagggaacttctctttcctcagccactgaacgaaagccttgggcttgcctctgcttggactgatatgctcactcctgaactcatcaccatggcccaaggaattcaatgtgcagactggctttcgctgctcaggttcgagcccactcaagccccgtaactaggaatgtctgggtcctgttaggaaaggggagcggctgcatggaggctgaggaggtggtctgggaggcctgctccagggcacaagagaggagccctgatctcactcttcattactaaatgtagcaggtggctcgggctaacctaatgaaattccaagcactgggtgccttaaacaaacagaaaattattttctcataattctggaggctggaattccaggatcgaggtaccagcagggctggtttacggtgaggcctctctcctcattggcagagcgcaccttctccctgtgacctcacatagtgttttctctgcgcgcctgcagagaaagggctctggtgtctctccttcttcttctaaggatatcagtcctgttggatgagagtcccacccttatgacctcatgtaacctttgttacctccttacaggcctttccttcaaatactgtcacagtgggtgtggtgggggacataattcagtccataacaccagaaaaggggcaaagctttgcaactccgcctgccctactcagttctagccagcagagctgcagaaagatcactgatgagactgaactccagcccaaaggttctgcactggccctgacaggaaaggagagaagggagggtcacacaccccagcagttctattatatatcccactcagctaagatggaagacttggaaaaataactgtctcattggtaatgaaaggattaggatagtggttgtctgctatgacgcaaatgcagtggccacatcccaagaactgtgcttttaagctccaaagcaatcaaagtcagggaaaaatggtcattgaaaatgaaaaataaaactatgtctgaaaaataacccagacccggtgcagtgccttactcctgtaatcccactgcagaggcaggaggctcacatgaggccagggtttccagaccatcctgagtaacatagtaagactccctctctacaaaaaattttaaaaattaaccaggtgtagtgatatgtgcctgtagtctcagctacttgggaggctgaggcaggaggattgcttgagcccgggaggtccaggctgcagtgagccatgattgcaccactgcactccagcctgggtggcagagtgagaccctctctataaaaaacaaaaagtaaagaataaagaataacccaatattaaatccaggaaataggaacttataaatatgattggactttccctcctgcaatgtgttgacgtgttagccccaaggactgttctccacatcacggaagcatggatcccatacagcccccaccccctctctcggcatcttcttccccattctccccaagtgctgaatgcaggatgtatccttccctgactgcagaaatctctccacacctccttatccaggcttgccctgcaggacaatggttcttcctcctcgacgcgtcaccatcctgctgtccacacaactcccagcctcccagaggcctcagggaacagaactgtcaccctgagagatgtccacccgacaggagcctctgtggctggagacgtccaagccaggtagtgtagattctcactattcatcatagtgaccgtgtagaagtcaccacggacactgaattaggaaacactgaacctctgctccacaggaaaatatgtgcgtatattcagtatacacatatctcacacacatagagtcaagattaaatcctaagacaacgcacccaagtagattctattttattttacaagagaaaaaaaaatgaggttcagaagagttaagtgactcagcagaagctgccccactaacaggtgccagaattaggatttgaccctgtccaactggcccagagctggagcttccctcccatctccccctacaggccatctgtgtatgaggctgaaacaactgggcagagtatggcctgcttcaacctcaggtggaaacatgcgtattggggacctcagaattttcactgttctgtgtgtgtctactcaaatgaccactaattgccccaaagtattgatttggaggttacaaataaattttagcaaataggtaaattttcaaatatggaacgtgcaactgtacttttctgccaccatgtcatagcctgaacaaaaatcagcctcgtcaggatggacaatctgtaagggtggctgccccgagtttgctcattcaaagctaggacctgggtgttagacccaggcatctaccaggttggttcctcactgctatagcttgaatgtctgtcccttctaaaacccgtgttgaaacttaatccccagtgtaacagtattaggaggtggggcctttaagaggtgactgggtcatgattcacccatttatggattgaaggatttgtgggttatcatgggagtggacaggtggctgtataaaaagaggaacagatctgagcaagcactctcagcccctttttcatgtgatactctgagctgccttgggcctctgcagaggccccaccagcaagaaggctctcaccagatgcagcccttcaactttggacttcccagcctccagaactgtaagaaataaattgcttttataaattacccactctcagatattcagttatagcaacagaagatagactaagacgctcactgaccacaaaatacaaggacagaaactgcatcccttgcccatcactgcctcctgagcaattggaagtaagcacatgccaaagagcagacagaggaaaatgaaggatccaaatctttaactcagatctttaatccttgttataaagattaacaaaagatttgatgagcatacctgactgctcattctaaattgagatccaaggcagacacatctaagaatgaaacagagtgggtctccttttcataattcattcatttggagtctgtattagtccattctcacactgctataaagaactacctatgacaggttaatttatgaagaaaagaggtttaattgactcatagttccacaggctatacaggaagcatggctgggaggcctcaagaaacttacaatcatggcagaaggtgcaggggaagaaagcatgtcttaccatggtggagcaggggaaagagagaaagagggagaagggggaagtgctacatactttcaaacaaccagatctcatgagaagtcactcactatcatgagaacagtaagggggaagtccatccccatgattcaatcacctcccaccaggtctattcttcaacacctagggtttacaatttgacatgagatttaggtggggacacagagccaaaccgtatcagagtcttttccccctaagtatgtaagtaatccactctcaatattgaaaactttttttaaaaaaaagtaaaaacaaaaaactaccaaagctttttttaacttctgacttcttacatcttttgctcctgtttaatgagttccctatcacctaaaaacaacgactaaaatttaagcaaatattctttcaatgtttttttgcccacagcgtttgcagtggtgactgaggcctgttttcctcataaatccccgatccccatgccatgtaaacagatgacaccccaaagtctggagaataggagttaaactctgggcacttacagtcccaagatgtgaggtcttggtctactcagaaagatgagaaatacaagatcagcctgaaccagttcttcccatccccagagatggaattaaaggatgtctggacaaagaatagggagacaaagagcacaggtgtgttgctggggtccctgagtataccccactttggaagccaggactaggcagagggtgagatcatagaatcccatgatcagaggacagagcccagcaaagtgtctgaccccagaatttgcatcagacatgcttataattgaattatacaagaaacagaatgggctccctgcagtgggagcagaagaaataccttcctgtggtgtcaagaagctaagcctgaaatggtcctcactgtccctggacacccctcagcaagccaagcacatctgaatgcatccctctgtggcagaaatagccctaagaggtccctgaggtcagcacttggagaacatggatcagtcaccacagtggcaagaatggccacaaggctgtgtccatagatgccaacacaaaaggttgaaaatgagccttcccactgtagcttcctcaagactattgccctgggtcagtccctgacatgggagcacacccagggaaaggggccatttctgaactggcagaaatctcttcctgtcatggtgcaacgtgggcccgaaagagaagctaaaatccagttacagaaaagtaaagcacatgtataggccctcgggtctgggggctgagatttgcacccactactcacgtatccaaacacatgacctttctgcttttcaaagatggtaccctccttagacacagtgtgttctgatagttctaattcctacttgctgataaattcctgaaaatcctgaagtgctggggctaaaattctgcttctaaaccgtgggaatcccctgggcttgttttcttttctcatgttctccgcatgtgtcagcgtcttgttttgggcccgactcccaactgcagagagcccttacctttgcttggaggcacatggaaggcaaagtcttccaaggctgagggtttttttgttttctgtttttagagtgggggtctcgctctgtctcccaggctggagagcagtagcgtggtcatagctcactgcttaaaactcctgggctcaagccatcctcctgcctcagcctcctaagtaggtagggctacaggcacacaccactacacccagctaatttttttattttaaaagaaaattttagctccctctcccgtctccctctccctctccctctcccgtctccctctccctctccctctcccgtctccctctccctctcccgtctccctctccctctccctctcccgtctccctctccctctcctttccacggtctccctctcatgccgggccaaagctggactgtactgctgccatctcggctcgctgcagcctccctgcctgattctcctgcctcagcctgccgagtgcctgcgattgcaggcgtgcgccaccacgcctgactggttttcatgtttttttggtggggacggggtttcgctgtgttggccggactggtctccagctcctagccgcgagtgatccgccagcctcggcctccggaggtgccgggattgcagacggagtctcattcactcagtgctcaatggtgcccaggctggagtgcaggggcgtgatctcggctcgctacggcctccacctcccagccgcctgccttggccccccaaagtgcggagattgcagcctctgcctggccgccaccctgtctgggaagtgaggagcgtctctgcctggctgcccattgtctgggatgtgaggagcccctctgcctggctgcccagtctggaaagtgaggagcgtctctgcccagccgccgtcccacctgggaagtgaggagcgcctcgtcccggccgctatcccatctaggaagtgaggagcgtctctgcccggcagcccatcatctgagatgtggggagcgcctctgccccgccgccccgtctgggatgtgaggagcgcctccgcccggccgccccgtctgagaagtgaggagaccatccgcctggcaaccgccccgtctgagaagtgaggatctcctccgcctggctgccaccccgtctgggaagtgaggagcgtctccgcccagcagccaccccgtccgggagggaggtgggggtcagccccccgcacggccagccgccccgtccgggaggtggggggcgcctctgcccggccgcccctgctgggaagtgaggagcccctctgcccagccaggagcccctctgcccggccagccgccccgtccgggagggaggtggggggctcagccccccgcccggccagccgctccgtccgggagggaggtgggggggggtcagcgccccctcccggccagccgccccgtctgggaggtgtgcccaacagctcattgagaatgggccatgatgacgatggcggttttctggaatagaaagaggggcaaggtggggaaaagattgagaagtcggatggttgccgtgtctgtgtagaaagaagtagacatgggagacttttcattttgttctgtactaggaaagattcttctgccttgggatcctgttgatctgtgaccttacccccaaccccatgctctctgaaacatgtgctgtgtccactcagggttaaatggattaagggcggtgcaagatgtgctttgttaaacagatgcctgaaggcaacatgctcgttaagagtcatcaccactccctaatctcaagtacccagggacacaaacactctgcctaggaaaaccagagacctttgttcacttgtttgtctgctgaccttccctccactagtgtcctatgaccctgccaaatacccctctgtgagaaacacccaagaatgatcaataaaaaaataaataaataaaattaaaaaaaaaaaaagaaaatggattaatataattgtcatgttaaaaagttaaaagaaaaaagttagaggatcttcttcataactactacaataatttaacattttatttcagattaataactcaataaagtttacacagatggaaatttactaaacatgatacatttatatcagtatatttgtgtttgtcttcgctaaaaaaaaaaaaaaaaaaaagaaagaaaattttaggtggctcacatctgtaatcccagcactttgggaggccaaggcgggtggatcacttgaggtcaggagtttgataccagcctggccaacatggcgaaaccccatctctactaaaaatagaaaaattcagccaggcgtggtggctcacgcctgtaatcccagcacttcgggaggccaaggcagatggatcatctgaggttgggagttcaagaccagcctgaccaacatggagaaacccccgtctctactaaaaatacaaaattagccgggcgtggtggtgcatgcctgtaatcccagctactcaggaaggctgaggcaggagaatcgcctgaacccaggaagcggaggttgcagtgagccgagattgcgccactgcactccagcctgggcaacaagagtgaaacttggtctcaaaaaaaaaaaaaaaaaaaaaattagctgggtgtggtggcacatgcctgtaatcccagctactcaggaggctgaagcagaagaatcgcttgaacccaggaggtagaggttgcaatgagccaagatcatgccactgcactccagtgtgggcaacagagtgagactccatctcaaaaaataaagtaaaataaaattctctatgatggggctaagctgagaagaagtggttggatatttaggaggaaatggcctctggtgagttaggcctgcctcacccacctttacagaatattcttccagaagtgctggagcagaaggacaagagacaggacagcaacttaaaggactagcaaggtagaaagaaggctaggggtttctagaaaggaaagaagaaagagtcccatggagagaaagagaattaagtttcagtcaaaaatctaaacagatcatgaattaaaaagtagaaatgcttttggggttataaataacatctacgattgctgaataaggatttcttatctcaaaagttcaactctttctgcgaacttgcaataacaattgcacattttaatcctttaaagctcgctgtggctatgagcaatcagatgtaaatggctgtatttcctttggaacaagtacactttgagctattttggtatcagtaatgtttcatatgggtttcacaatgtatagacataaatatatgaacaatctcccagttcctattaagagattgaacagatggccaagttattaatatgtggcttaaacccagcactcagacatctgagaacacgcattggattcctgaggcgtcacagcaatgctcagcaggctggctgccacatggtggcccaagaagcaggtgcttgttataaacatcaaagccccacatctgacccaatggagacacccctgttcagagtacttgcaaggcaagaccaacatgtgcgagctcagagtccagcagtggcccatggcccctcagaaggccctggaggtgcccaagctccacctgcccatggaccccaccgcaggccagctctggctcagtccctggggcttgagcctaacagacagggcaggccatgctgcctgcccattctggggcccctgccaggcccagtatctcctgaagttggaggcattctggggccaaagagagaagtccaacatctccaggggtgagccgagaaaccaacctggactgccagaactgccaggcctgcctgaaggcaggggtttttcttgggtgggtgggttggcacgaagtgtttgccatcgggattatcagtcaggcctagcaggtagagccgtctggagtctaacctgatgcagcaggtagacactgcgtgcactggatggctccttggccctcagcagcctcagtcagaggaactgacactcccagaagaccagcttccaagtaccattttgctgtctaaagcacatttctgtgacaagttctgcaactttcggtgtatcttactcttagcaaaacaactcccaaaatccttagtctaacatgctctgagccacagcccacatgaccttgaatttcctttccagtacaacttgagagtagaacttagagccatgctctatgaaggctcccactcagttttgaaattgatgcagcaggaaacacgttctggacgaagacttttgaattcagacaagggcgatgagtgtccagagagccaggtacgaagttcacagaagctgtgatcagaacacatccgcaggacttggagagatcacaactcaacaaccttgtctaacgccagtctggttggcctggtgcaaactgggctggccaacgtctggccctctatgctgagcccacccacagtgacttgagatgcagagatttgtgatgccggtatctgctgaggcaaggaatcttgttctttgcggccatttccctccctgcaaagttgtttcctccaggagccccagggtttctgttccttctgggttattccagctgtagggccccagaaccatggcatcctctgtgccatcagggccaggggggactccatgtgcccataggtggtcttctatgccgacgtctgctgccataattcctagagggtccaactagccttgggcaaagtcaaatcaaccagctggctctgcaagctctgaacacagagctgagtctgaatccacttctttcttaacatccatgagccttggtgccctcgtttgaacaacaggcctcatctctaggcctgtttcaaggatgatatcaaaggatggcagaatgcaccatcccaatatgccactttggcacaaggaacattgactcaaaggaacttagaaaaaccgcaggtccaagaagagcactctgaccccaaccccacccacttaccactcttttttttccctagaggtaggaaataaaacttccatgtgaaaggcaccctccctttagcgggaggaaaggatgattcttatcactagaagcagggagtcaaagctccagagtattttgaacaaacagacttcgtgaaataactcttatcttcctttcatttccccacttatcttacttttcacaattgcctctctttgttcaacccagtagctaagcacttgggttttgccacttctttgggtcttcattttcctatggggactctcgtgtatgtgtaaaaatctgtgtgctttcctcgtgttaatccttcttgtgccaatctgatttcaaggcctagccggggaccctaagaggatggaagtagttttgcttcccctacaatatgaaaggacaaatctaaaactgtctagacactatgtctagtgcactgcagggaattaaaaagcatcagtttccttctctcctggttaatctcagtagctcctttttaggatggtggcatccacaaatggcaatgaagatgcaggaaggagagggagattttgtttatattgtttgtcctttttccaaataagtaaaactgacatttctggcttctaaaattatcatttcctacaagtaactacactgaattggcttcattgaaaaccttttatgtgcactttctctcacagatttgttataacgaaaccaaaggcaatacaaataaatctgccgataaccctggattacttttattgttaacagtaatcaaaatgatcgcactttcatctcccttcgtttccttttctaaggtgttaatgaggagtgacatcaccctggaatttcactaaagataaaatataatttacagattatactgagacaaggcttctatttgtggttaatggagttcatttaaacagcgccagattgttcttgagttaaagaggtcaccaaataggggctggtgatatttttcatgttcaaaatgtttgtggtaattgtatataatgtgataggagtggaccacaaattggataaccagtacggaggtattctaaagtcagattattaaatcaagaagctacccagaattagatggcatggcatgcaaattgagttccttctgccaccaaaggctcccagcccagtctcatctatctaagcttttcttgaagcttgatttatcaagagagttccaatgctggacccatttctctacccaaaacccagaattccaggcagtcatcggtgctctccttctctttctcctttcatctttctctacatcctccttctctttgaccctcttccaacccaaattaagactgcaagatttgaccaaggctggtggctcacacctgcaatcacagcactttgggaggccaaagtgagaggatcacttgaggccaggagtttgaggccagcctgggcaacatagtgagacaccatctcactatggtggcatctcagcatggtggcacacgtgcagtcctagctactcaggaggctgaggtggcaggatcactggagtccaagagttcaaggctgcagtgagctatgatggcgccatggcactccagccttggcaacagagactgtcttcaattaattaataaaataaaaactaaaagactgcaagacttgaacacaactcaggaacgagtctccattggcaaaaacaagatagaaactggattgggtaatttatcatgaatggaattctgcataaatgtcctggctcacagttctggaggctgggaagtccaagatcaaggtgccagcaggtttggtatctggtgagggcttggcatccacttccaaggtggtgaggaattaactcttttcctcacatggcagaagagccaagaaagagcaagagggggccgaaattgccctttcataacaccaccaatcccaccgatgaaggggtaacccttatggcctaaccgcctcttaaagcttccagctcttaatatcatcacaatggcaattaagtttcgacatgagttttggaggggacagacattcaaaccacagtgccatttgtgttcattctgctttttagttttctccagaaactactggccttcaaattagtaatttactggcatgaatataattacaaattatatacctctaaataattattgatctgttactcatgatttcagtataaagtatgcaatatacaactcatttgaccaaccagtacatgctaagtccaatgattgagcatcaatcctcattttccttggtgtatcagttgcactaaacccaggtgagccatccttcctgcttcaacacattcttcaccaggcttccaggaaactaggaaaccatggtttcatcctacctcccatgggctcttctccatctcctgtcatctccctgaccatgtgacactgcagagccccagggttcatcccttggtcctccctctgtactcattgcctgcttatctctaccaagcccacagcactgtatgcgatctcttcagacaactcccatttttagcctccccaactgcctactcaacaacttcacttgaatgtctagttgacttctcaaacttgatgtatacaaatcagaatgtctgggtttctgtctacagcatacccccatctcagctaaaataactccattccagttgctcagaccacacatttgatatcaatttggttcctcccattcatacctacatctgagctgttagcaaatcctattggccagattaatcagagtggttaatggaatggtatagatacaaggggtgaatactattggaatacaactcttcatgggtcactcacatttctgcatttcttgagagcagaagtactctctcttcaaggctgtttgtatagcaaacagtcttagaagatagagatgctatctcctagatcaaagggcagatttgctatgtggtaaaataagagagaaaagggcaggtttgcttgtccatcataaaagatttgaattccctaagttcaaggttcctcagctgtgacacagagctcccacctggactcttcatcatccctgtaggacttaggggacaaaggatgctgacaaaaacatgaagcacacacttcttgctgtcctgtaagaaaattctctgtctctaacccagaaatgggtgaaatctgtcagtcagtttgcaagtaaggcacaaccccagacccttcagttctatgactttcggagcacagagtgggcttataattagatacaaagaaagctcacaatgtttttaagggtattgtatttcaggctttcttctttctatggataagaaagctcctcaggtggcaacaaaggccatttctttggaagcaggcatggcatgtgacgaaaaaaagacatctcagaaaagagccaagaataagactggagagccactgtcagagaacagaaactgggcttaatcaaggaacatctcttgttcccagagtaggaggctggcaatattttctcactgaaatttcagaattgttatggaccagtgactgctctatgtgttcaatttgttcccttttcaaatggaagcatttattgcagacgacctgcctctgtcccaccattgtgtattaggtttgtagagtgtagacaacttgcctttttagtttgtaggtttctgtatcaagagaagatgtgtgtgggcctaacctagattacaggatcctggacttcaagtctgatataatgactggatgagactttgactgtcctagaattgggatgaacatattttgccggtgggagggcgtgagtaattgcggttagagggcagactgtccctcacacctattccttttcatggtgccttcccaaactgcctctggaggtggccacacaaatggctttggccattgtgaccatgggaaacttgatgcagaggctggaaaaagcacttgcatgtttctgtctcctctcttgttcctctacaatcacaagaaatgtctaggcaggtctgagcaggcccaggctcatctgccatggaagaagaatggcacatggaagagggtcacattgtcccaaccaagacgatcctagaccagccaggccccagttcatggttcaagacacatgaacatagttgcacgaaccaagattagttgtgtatggcccagactagcagcagcacccatccaacctacagactctgagaaataaatactagttgtcttaagcttccaagtttcagtgtgagcattaggtagtaacagttaatgaataagacagataatcattttatctgtctggatacttatacaatgatttctattttttattgatacataatattttacatattgctggggtacatgtgacattttgctacatacatagaatgtgtaatgatccagtcaggatatctgaggtgtccatcactttgagaatttctcacttctgtgtgttgggaacaattcaagtcgtctcttctagttattttaaaatatacaatacattgttaactgtagtcttttttattgaatgacaggacttgtaccttttatctaactgtatgtttgtatctattaagctagttctctttatccctgccccctcctacccactcactcttcccaacctctaacatgtatcatcctattctatatctccatgagatcaacttctttagctcccacatatgagcaaaaacatatgatgtttgtctttctgtgcccggtttatttcacttatgacctccatttccatccatgttactataaatgacaggatttcattctttttgtggccaaacagtatttcattgtgtatatatactacattttctttatccattcatccattgatgaacacttacgttgattccatatctttgctattgtgaatggtgctgcaataaacatgcacgtgcagttatccctttgatacactgatttattttcctttggataaatacccagtagtgagattgctggatcatacggtagttctacttttagtttttgagacatttccatacttttccagtgtttgtattaatttacattcccatcaacaatgtataagatttccctttcctccacatcctcaccagcatctgctattttttgtctttttaataatagtcattctaactggggtgagaggatatctcgctatggttttgatttgcatttccctgatatttaatgatattgagcatttcttcatataacctattggccatttgtgtgtcttttttttttttttttttttttttgagaattgtctactcatttttggctttttaaaagatttattttttgttgttgttgagtttagtgcatatcctggatattagtctcttatctgatgaagagtttgccaatattttctcccattcaacaggttgtctcttcattctgttgactgtttcctttgctgtgcagaagcactttatatacagtcccatttgtctattttttagtagtctatgcatttaaggtctcagccacaaaatctttgcctagaccagtcctaaagtgtttcccctatattttcttctagtagttttattgtttcatgtcttatatttaagtctataatccattgtgagttgatttttgtatatggtgagataggggccttgtttcattcctctgcatatagatatttaattttctcagcaccatttattgaaggtgtccttccctattgtatgttcttggtgcctttgtcaaaattcagttggctataaatatgtgaatttatttctgggttctctatgtggttccattagtctatgtgtctatttttataccaatatcatgctgttttgattaccatagccttgtaatatattttgaagtcaggtagtgtgatgcctccagctttgttctttttgctcaggattgctgtgcatactctggctttttggttacatacaaatttcaggatttttgtatttctgtgaaaaatggcattagtattttgataggaattgcactggatctgtatattgtcctggacaacatggtcattttaacaatattaattcttctaatctatgagtatgagacgtcttcccacttgtttgtgtcctcttcaatttctttcattggtgtttcataatctcccttctacaggcctttcacctccttggttaaattaattcctaggtatttttttgtagctactgtaaatgggactgccttctttctcagctagttcatttttggtgcatagaaaccctatttttgtatgttcattttctatcctgcaacattaccaaatttgcttatcagctttaagtgtgtattttgctttgcttgtagagtcttctggtttctctaaatgtaagacgatgtcatctgcaaacggggacaatttgacttcctcttaaaaatctgtatgccttttattcctttctcttgcctgattgctctggctctacctccagtactatactgaataaaagtggtaaaagtgagcatccttccttgtcttgctctagttcttagaggaaatactttcagtttttccccactcagtatgatgttagctgtgggtcatatatagcctttattatgttaagatatgtttcttctgtacctggtttgttgacagctttttatcataaaaggatgtagaattttatcaaatgttttttctgcatctgttgagataatcatatggtttttgtcattccttctactgttgtgatgtatcatgtttattgatttgtgtatgttaaaccatccttgtgtccttggtataaattatacttggtcatggtgtattatctttttggcatcctgtcgaattgtttgctagctttttgttttgttctttttgagaatttttatgtctaggttccttagaaacactggcctgtagttctctttttgtgtgtgtgtccttgtctagtttggtgtcagggaaatggtggtcttgtagaatgagttgttttttctttgatttttttgcaagagtttgaggagaatgggtattagttcttctttatgtggttggtcaaattggcagtgaattcattcagtcatgagcttttctttttttgggagggttctcattactgagttaatcacactgctcattactgatctgttcagattttctatttcttctggaatctcagtagttgtatgtttccagcaatttatccatttcctctaggttttctagtttggtagtatatagctattcataatagtctctgatgatcttttgtatttctgtgatatcagttgtaatgtctttttcatttcctattttatttgggtcttttcttgtttagtctagcaaggggtttatctattttatctttttgaagaaccaactttttgtttcattgaccctttctacgtctttagtctttatttcatttagatttgctctgaactttactatgtctttccttctaattttgggtttggtttgttcttttctagttccttgaggtgcatcattgaattgtttctttgatatctatctactcatttgatgtaggtgtttattgctatacactctcccctcctagagctccttttgttgtgtcccataggtcttggtatgttgtttctattttcatttgtttcaaacattttatttccatattaatttttatcattcaggaggagcatattatttaattcccatgtatttgtatagtttccaaagttcctcttatttctatttttactccattgtggtctgagaagatacttcatatgatttcaatttttaaaaatttgtcaagacttgttttttgtcctaacatatggtctatcctggagaatgttccatgtgctgatgagaaaaatgtgtactcagcagttgttgagtaacatgttctacaaatatctgttagatccatttggtctaaagtctagtttaaatccaatgagtttttgttaattttgtctagatgatcatgatctgagactgaggtgaagtccccaacaattatcgtgttggagtctacctctctttttaaatctagaaatatttgctttataaatccgggtggtctagtgttgggtgcatatatttagttgttatttcctcattagattgatctctttactattatataataactgtttactgcttctggcataaagtctgttttatgtaagtacagccattcctgcttgagtttagtaccatgttgacaaagggatgcatagagagttggtaaagcatgatttctgggtgtctgtgtgaaggtgttttgagaagagtttagcatgagtctgtggagtgagtgggaagattctccctcaatgtcagcaggaaccatccatccactgggggcccaggtagaaaaagatgaagaaatggtgaattctctctctctcctggagctgggtcacccttcttctgcccttgaacaggacatcacaactccaggctctccagcctttggactccaagactgacaccagtgcccctccccaattaccccaggccctcaggcctttggcctaggattgagacttacaccatcagcttccctggttctgaggcttctggacttgcactgggccatactaccagcatcccagggtctccagcttgcagagagcctgttgtgggacttttcagcctccataatcaagtaagccaatttccctggtatctatatagatatacaatcatgttttgcttaccagcctgaaaaatgtatcgctagatgagtctgtcattgcataaacatcatagtgtacttacacaaacctagattctatagcctactacacacctagtctataaacatgtacagcatgttactgtactgaatattgtaggcaactgtaacacaatggtgaatatttgcatatttaaacatatcttatcattaaaaagatacagtaaacataaggtataaaagacaaaaaccggcacacctatatagggcacttaccataaatgcagcttgcaggactagaagtcactcagggtgagtcagtgagcgaacgtgaaggcctaggttattactgtccactacggtagactttatcaacactgtacacaggctacactaaatttattttttaaaaatttgctctccaataataaattaatcttcgcatcctttttttgttgttcactgtggcatccagtttctacccacaaagaaaaagctccaatgcaccttttaattttttgaaaaattcctgatattacagaactaaattgaaatgtattaacatctcactcttacattttcataataaacagaaaaattcataagccaaaaaacaaaaacagggagtgctggtcacagtggttcatgcctgtaataccggcacttcgaaaggctgaggtaggtggatcgcttcagctcaggagtttaagaccagcctggacaacataatgaaatcctgtctctctgaaaaatacaaaaattagccgggtgtggtggcatgcacctgtggtcccagctacttgggggtctgaggtgagaggactgcttgagcctgagcggtcaaggctgcagtgagccatgtttgccccactgtactccagcctgggcgacagagcaagaccctttctcaaaaaacaaacaactacaaaaacagggggaaacttatattgctaaatacaatctcagcgtcaacactggaacagagaaaggaattaaaacaccttaattaaaaaaaaaagggtggatgacaggctggcacagtggctcacgcctgtaatcccaacactttgggaggccgaagtgggaggatcatttgagctcaggagttcaagaccagcctgggcaatgaagtgagattccatctcatttttttaaaaaataaaaaataaaggaatggatgagtgttaaaaaccaaaaatttaaaactatttaaaacctgacatggctgcttgttcagaaactacagatggatgatgggtggtggtgaacagcagaaaggggttatagtacgtgaatctgcattgttctagctgttccccatgccactcatcctaaggtgagccggacattgattagccattgagccaggctaatgctggcagcagatccagtgatggtaacctgcctatcaatagatccttccactgggttcacaattttgatctacgctgcagacatctgatagatctcatttattctggtgccttgacacctgattatgcagccagtatcatttggaatggtgtttatgagaagtggtctgagcagatgcatccaaacctgcactgaaccccagcgttgctatctactgtaggaaaactagattgttgcattgtcaactggtgcagcttggtcaactctagaagtggtccctccaggtcacagttgaggcacatggacgaagtggtgtggagaaagcaagctcacactgtcgctgcctgtgctgtacctgtcctgatcacctgcaaagatcaccggagaattggacagcttggaccagtatgggatggccatgcgtttgggggaagactccaacaccacacagacctgtccaacacactcaatgatggactgcggaatcccagcgatagtgatggctcagtcagcagcgttggggagcatatcccctgccacctggacctgagccctgtactctctcgtattgccttgatcttgcaaccaccttttccaatgagccacagtgactagcagggaccaccagcatcagggtgaccagggggtccactggcagctgtgctagtggtcacagagctactgatatcctcttccaatcttgctttgaagatggcgctagtgggtccagccaagatgataattctctcagaacaactcccttctgagatgctgatacatgcaccactctcctcatgcatcttaactgattctcctctttctgatgatactgccaacttcctttccatgcataagtagccaggtggtgagaatgacatttaatccaatttcaatcataccagtgtccatatcaagcagggctatggggagctggacttggagtggtcaagtctttggccagtggggatgaaaaccaagaactccaggcaggaggcaactcagggaaaaaggagagcaggcagggtggggcaggggtggaacaacaggggtgggcagaaaggcaacgagaaggaggagaaaaggtggtggaggaagagaaagaagggagagacctcagggcaggtgggagagagcacagcctgtagctgctcaggctgctgcctctgctggtgtcaatctcagcttcctgtaacttttctgctttctaaacttttatttttttaactttttgactcttttctaataacttagcttaaaacacaaatacactgtacagctgtacagaaatattttttctttatatccttattccataagcttttttccattcaaaagttttgttttttgctttttgttaaaaactgagacacagcacacacattagcctaggcctacacagggtcagaatcatcaatatctcactgtcttccgcctccatatcttgtcccgctagaaggtcttcagggacagtaacacacatggaactgtcatctcctgtgatgacaatgtctgcttctggatacctctggaagggcctgcctgagactgttttacagttcgcttttttgttacgagtagaaggaatacactctaaaatagcaaaaaataggatgtacataaaccagtagcatagtcatttattgtaagtattatgtactgttcatagttgtatgtgctggacctttaaactggcagcacagtaggcgtgttttcaccagcaacaccacaaacacaagtaacacatgaggtctgaccttaggatggctaccacagcctaggcgataggaatttttcagttccatacgatcttatggacccctgtctacatgcggtccgccagtggtatgtccttatgtggtgcatgactatacacatcctactggttctctctggactgctctaatatactgggcatatactgtcttgtctgtgtcatctgttacttctctatttctgtcctgcatcttaggacaccaactcaagttagtcctccacataatggctttgtattataccctattttatatatatgtaatatatatacaacttagatcacatactatttgttgttattttatataatacagattttaaagttgaagttttgcttctgttaaaatcttttccatgaaattttttaaatttcctttcagctagctgctgcttctcatacatctcattatttgcttttggaaaaagcaggggttcctgacttttaaaaaatagctgtttcctacagtcatgtttttcaacagaatgctcttcttctgcatttttaatgctgtttctatccttcgtattgcttgttttcttcagctactctcctttgaatgggaaacctacccaggcctgatgtctgctccggctagactcgaactcctgggctcaagcgatcctcctgccccagcatcccaggtagctgggactacggataagcaccgctgtgcctggcttggtatctggccctaacgtggctctgctgcactgacagccaacctcctgcacctgctgcctgcttcttatcacaagaagaggtttactcctggacagtctgaagcaattatgattctttccttaccaaaattattaaaaactacaatgcccagagttatctgcttctagggttctcccaggattactgccgatgcaaaacttgtcccccaactacttccactcttagccatttgacactgccaagctctgtggttctcaagttagcaagaggaagtacaagaaggaatgaagactgacagctccagctgcccccagagcagctccccactcctttcttaccacatcaccgtcagcatctttgaggtggggcacacaaaggtgtgtcaacatggaaataccaccttacagttcttcaaaagcattcttatatcattattctcacaattcagcaaagcaagcagagaatttccttcattaagcagatgaaaacctggaccccaagggaagtagataaccacccagggagtactgtcaccagtattatctgtagtttacagctgagaaaactgttgctcaggaagcttcaaggcatctgcccaaagtcacctggcctgtaagggctggcctgggattgaacatagtctgcttttccaagatcactcttccttacttaccacactgaccctcagcacaagaagaggattagctccagctaggaccagattccaggtcatatgatgttacctcagggctctgcaggcacatttctgaatgaatgaaaactttttttgcaacaagggaaatgcttagatttctgccttcgggatatattcataagcatactatgcacaagacttccaattcttgattatgtaaaggaaaccaagtttactcaagaaggagttagaacacagtatctccttaccatacttctaatcattaccaaaaacagtaaatgaactggaactagaaaatataaatgggtaagtactctaaatctatagtatgtaaatgattcaataactaaaaaggtgaaaaagaaagcagaagagataagaagcatttaactccaccattttaaaatttattttcatgaatgcagttcagtttgtggtcctgtgaagttgtgtggctactccgggttcatgattccattcacactcctaatgataacacatgactgtaagagaactgctgacacgcgcagagccagccttgaaagagagccctgggaaagtctgggtgaagaggctatctgtcagatattactaaaaagtgaggacatacacatttctgtttcatttttagtaaatatataattttgttactttgtcatcaatttttacccacaagataaaaaaaactgcaggactcctaaaatatccagaaactttccacatattaagaatcaccaacaggtcaatgaatagttacacctaattaactacactttgccacatgaataccatctgctgatatctgtagctttgaaaaatttaactaaagttgggcacagtggctcacacctgtaatcccagcattttgggaggccgaggcgggggaaatgcttgagcccaggaggtcgaggatgcagtgaaccatgatagcacactgcacttcagcctgggcaacagagcaagacccagcctcaaaaaataaataaataaataaataagataaaaatttaactatagtaccttaaaatattcaaatacaacaatactcccacctagtggataaaaggaaaatgcttggcttattttggttgtgaataataccaccataaataaggaattaaaactacaattaattttttacaattttattccgtttcatcattctcaaaatatatcccccaaaagtaatctacaaaagagtgcaggctgctccccttaaaggaatggacaagtaatatacactacaaaacaatgtttaagatcatgtataaatgttactctgaatctcatttgttgtcatcaatttctttagtatctcagtgctttggggaatattctgaaaggagagaaaaaagtgaatacagtgagaccccagggattcaggcagaggcaacacccctccctccacgaccaacaatctccacactcgagacttaaaaacagccatgggacaggcgtggcctttactctccttctcaacgaaaaggcaagtgggaaagtcagttcaacaggccctttccctgccacactcgccgatgatctcctggcctccgatggtctcctggcctctggaggaagtctatgctctaacccgcccgaccttccccacaagatgtcttcctcccctctccaccaacaccacactcctcacggctctcctcacactttcccactctgctcacactgcttccctctgcacacttctacccaagattcatccatctttcaaatccaactaaactgccacacaggaagaactcaaaataattccaccttattgaaaataccacttttaaaaggtcagaaacaacgaactgactcaggctgatgtaattggtcattaagaaaacagcaccctgcagaaccaccatcttaccctcctgctaatcattatctccaaagcaaaaatgaaaatgctgagttaaatttccccttgaaagtatattcataaaagctgagtttccttaagccccatatgacagatgatttccaagtctctgaacaagtccaagcgtttatgacacacctgtgtgctacacacagtcctacagcagtaaacaaaacagcccagcccctgcccatgggaactcatctctgagttaagtgggatgaggcaattggctatttaaacaaacaagacgatcagcatatactttgaaagagatgctaaaaataaattaactccatgtgtcagaaagattaccctggattctagctaatttgcaagataagcttgcagtatactaaatcagagttttacagctgtactcttcaacaaatggttattgatggctttattcaacatgccaggtatgtggtaaacttgggataccaaaattaaaaatcgtggtccattaccacaaggagctgacaatctagtaacaaactaatttatgagacctgggaaatgagctacttccaacaacttaccacaaaagtcttaaaactaatggccattccagaataaaaccgggctgagggacaatgttgttacaacctctttcctttaaagaaaccatgcttaaaccagaggctgtggacttccaaaaaagtctcttaagagaaaacaatggaatccctaaactacctgagattacaggcaaacattttcatgtacgtgttccaatttttttagaaaatgagaccaaaggtataaaccaagggtaaggaagaggttcattatgtaattctctcatcttcacatatacagttctctgtaaaattgggtaaataaatattataataatttgatccacactatactcaaaaataaccgtctcaaaaattaaataaaaattttttaaaaaaccttgcaaagtagttatagaagcttattgaacagtaaaaccatctgtccacatagacatttgggatttaattgcactgcattaatctatcatacaagaacaaagcattcgtcaagttacagacgtatacagaagagatgatgacaatcaaattcaaactgccagactagaaagcttcgctttgagaagaatggatctccaagcattgcttagggtttaaaatgacagtatacatttatgtttgttactaagctgattataacaatgcagctattaatttaaatgagttaaaaccttaccttaaccaaacccttcaagcttctggtagaaagtataggcttaaaagcttccactgtgattaggtctaatttcatcacatcagtataacacaagtacagaattgctgggattttccatacttgacagtagcttagaactatgaatacacaagaaaaaaaaacgatgtaagttttctattatgttacttttaaattaaacacctttaaataataaaggctgttgttaaaagtagttatctcagctgcctctttcaatcaaggtatttactgcaattttgaaccaattataatgaagattttctttcaaagtcaatttattttcctaataatctcttcttttgcaaatattaattttatatttcctgaaaatacagctgagatgatttaagtagctgaaagattaaaattctactgactataataaagcatataaataacaaataagtacaaaatgcataaagtgaaatatttagccacttctcattctagtaaacattgaaagcaaaaagaaaccccaaccaaaccctattttaatacagttcatataataaataacaattatgtaatatattacccactgaaaagtaaatggcagtctctttgtcatatgatggcagatgtgtgtgatggtaataaaaaaattaaagcaactatcaagattcaatattcaaaacttctgttttgataattaaaatgtactttatcaacttttgatgcaccaataatttatatttaacactggcttgcattctgaataatcaaagaccaaaaagaaacacagcatgtctgaagcccaacagttaagaaacatgagctcctcaaataactgtgtctggaaaatctgaaaactcaaactaaatatactgcacttgtaactacagatattgaggactaacagcaatatattggtatcaatcatcattaataaactacctcaaaaagacctctaatggtgaaaagtagtatcaataaagcaataagatagaatgtaaatgttacaaattttaataccacctgctgcaggaaggtcgtgtactatattcggttgttctagcaatggacaacacgccgagtctttgaaattctgtgtttttagggctctcaggaaaggagaaggaaggctgccggtggattctgaggttttataatcggtaacatgtcgacatgtgagaatagttatctgcatgttcttccttggacaagagccaaaaacctaacataaaatttatttcaaattaaaaaaaacatataattttgttacagaatggaaacattcctctaggtattcacctaacaccacagacaataatagcatgcctagcaggggtgggagtgtgccttggagaaacagaacacacctgctgtcacaacctgggtttgatcttggttctgctttctaggtgggcaatttttccaagtcactctcctcattagtgaactaaggtgatatagtttagatgcctgtcccctccaaatctcatgttaaaatgtgattcccaatgttggaggccggacttggtgggaggtgactggatatgggggtagatccctcatgaatggcctagcaccaccctgttggtgatacgtgacttctcacttctcgctcagttcatgctagagctggtagttcaaaagaggctggctcctcccctctctcatgctctcgccatgtgatctgcctgctcccccttcaccttccaccatgattggaggctcctgaggcctcagcagaagccaagcagatgccagcaccatgcttcctatacagcctgcagaactgtcaatcacttaaacctctgttctttataaattacccagcctcaggtattctttatagcaacacaagaatagatgaacacgtaatgccagcactacctacttaaggggcctgcgatgtggagtaaatgaagtcagagtgccagaatagcgactacaggtctgccgtccagagaaaaaaagtcacaggtacacacctgacattcattccctctcccacctaccactgacaccttaaaaataactctcatgaaattcatttttggaattactacacttataggtaagcttcaatcactgtggttctaaatgtcctcttctataagtagaagagtctggatttgatagatttctaagaacccttttaccttttaataagatctaaagtgatgtaaacaaagaaagatgggcgggaggaatccaattgtgttttatacttctgtgacctaccatcctcaatgctgaggaccaactgtgttttatacttctgtacctcagcattgaggacgggaggacacagaagtataaaacacaactggttggtcacgttaaataagcaagttcttttattctttatattccaaaagaaattcccacaatattttaaagaaataaatatctgactgcataagtttaagttaaaagacatcgaacccttaaaaaatgaaaactcctgtagactaaccattcacaggttttcatttctctcttaccttttccagccactgatactgttgatcttctgcaacatagcaactgcactgacagagaaaaacctgaaaagtcaagttccacgctttttgtcaagtaagttttatacacaccacaaactatcaccatatatgtaacatgtgaatgacaacacttaggtaatacttattttcctggctccactattgacctacttatttctctttaaaatttaacagtcaaaccactactggtgattagtatcagaaaaagtgcacactgacagagcaactgaaagatttgccatactaaagtatactaccagtaaataacatgtaagtgatacttaaataactgcttttcaaacatacaagtcccacctaccgagggattggattttagatgataaaacacacaaaaagcctctgtggaggacagatgtgtagtgtctgttgttctacaccattcattccagagtttagcacaaccaacttcctcccagactcctgaattcataacaaatgatgacagaaatgctgtaaaaaacaattcacataagttagtgtttggctctgcaagctatattttctattcaataaaaagtaagctcaagttactgtagaatttgagagctgaaagagccattcaagaccgtctacctaataccaccattatacagaaaaagaaactgaggcccccaagaagtaaaaggccacacaccctgagtaagacaatcctagagctagggatcaagaaggcaggtttgttgacagactttctaccacatgctcacggggtaatactcttctgaaaaactttaggccagcagaactttatataaatgagtccatagttacttgccatcatgtacttactatgttctacaaccactaggggtaccttacagaggaagggatcttaactgggtttcctgaatgttctcatcacaacctgtgaacaccctaaaaatataaaggtctatgtgtgtatttgtaaatgtacattgtcctagctgcactctacactgtttttactttaatccaccaagagaattaatacatgcaaggaccttaaaacttaagtacttaaacatgttgataattattactgtctttagagttttgtgttctcaaaggagtctattaactcaaaaacattaacataaacccggatacctcaacacactagaaacagctccttgagttttaagttcctgaagctaaaaacattttctttaaagcttttctctgagttggggtcttgctttgttacccaagctggagcacgatcagtgggaggatcgtggctcactgcagcctcaaaatcctgggctcaagcaatcctcccatctcaggctcctgagtagccaggactacaggcaagcaccaccatgcctggcttcatttttttattttttgtagagatacggtctcactatgttgcccaggctggtctcaaatcctggcctcaagtgatcctcccgcctcggcctcccaaagagctggggttacagatgtgagccactgcacccagcctaaatctgattttttcagtttattaaaaagatagtgcagaccaggtgctgtggctcacacctgtaatcccagctctttgggaagctgaggcaggaggatcacttgaggacaggagtgcaagaccagcctgggcaacacagcaagaaaccatctctaccaaaaacaaaacaaaaaaaaatgatgcaacaggaacaggagagagattttactcagaaatacaatcactctactgtggctttttaaagtactaaacattttaaatcttttatgatggaagaaaataagtatatttcattctttcaacaaaatgactaagtcttctgcattttcacttacctactgcattatttcctatagcaattataaacttggagcacggatatttttctagcaaagaaacttccaaagatgtttttgtttgtcttcgaaggagccgcacttccctaacacaagaaacaagatgaaactaaagcaacttcaatataaacagtatcatggcaaaagggcactatatgtatgatttacaataaataaaatgcacgttagttttataaagaatataactaatatcctcagaaaacgatggactcggacaatgataaccaacagataaaactattgcatacgtgtttacggagaactctaaaatagtgatcaggctgtccacctgacccaagaaccaatcttagcatccctaaaagtgagacagctggggatagcctgcaataagaaacagaaagcaccacttagtagaagcattcttgccgacaaaactttgaatgagaatctgaccaagcctccaaatgaacattcattttacaggacatgcaggtgatacaaacgttaagtgacaccacaacgaagctatcagacaaattcagagtgtgggggcactggacaagacaatcagtcctgtctcttaggaggggtaagaggaggttgctctaaatgaagtgacacgtctaaatgtaacctgtggaccctgttaggattctcattcacgcagaccactgtaaaatgtcatgtttgaaaaaactaggtaaacgtgagtgagcatggactacaaaatgatactggaaaattagtattagtgttgttaggggtgataatagcatatgtaagaaaatccctaaaacgtttgagatgtattctgaaaaatgtagaggtgaaaggccatgatgactggaattcgcttaggagtggcgggagagaaaataaacgtggcaaaatcttcctgttgaatttacccggttgtgtaggggtcagggctcacttgactattttctcccacttttttgtgtttggaaacaatttttttaaagcgtgttcatcggctactgacacatcatgctaattgaagtgttgggtgcaggtttaaaaagtttcgagggaattggtgtgtccgtgaacaatccacgacaaacgtggtggggcccgcgggagcgctgcggcccaagacagtgtgacaagcgggaagatcacgagtccgcaagacaccaagcctccagaaatgctccagaaacgctccagaaagcctttaaagaacggatttgaacccagccctcccacagcggcttcaccctggactccacgaaacgccagcagatccacgcgagaaccacacacacctggggctggcgccgctggacgccgcggcttcacggagacccagggcccaagcagagccaaggagcggcggcaaccgcgggggccactcggaagaccgcggagccccggccttaggcgccgtcgcggctgccaggcccgcgcaccttccagctgcggtgagcgcgctgcccttatcccggtgcctcacctcttccgcgccagctgcagacgcacctccctgtcctcgggcgtctccctccgcccctcctcctcctcctcttcgtcctcagtcccagctcggcacggcgccttcaccacctctccgaagaacgtggccgccatagccgccccgtgaccggctggacacaactgcagcgccgcgggaccgcacgccggcttgcgcgagaccacgctccctcaccgcgcgggcaataagtcccgccccgcacaggccacgccctccgcgcacagcccaagctcgcggccacacccccaccgcgcgggcgctacgtcccgccccgcacagggctcgctcccaggcacaccctgagctcgcggccacgccctctacaccgcccgcccgcgctgtcatgccctgggccagcagtccccgcagcttttttgtttttaaattacagattgggggagggggtctcgctatgttgcccagactggtctcgaactccaggactctagcgatcgtcctccttagacctcccaaagtgcttggattacaggcctcagccaccgcgtccggcccccaaaggctttcattcgcagcttgagccctgcgggcgccaggaggtgggaggactgcgggctagaggggcagggggcgagaggagggcggggcctccgttcgtggcggtagcggaaccaggggtgcaggggcggagccagcgccgctggccgtggcgtccgggagctgtggggccgtcccctcatcgtccgtttccattttccttctgcgttaggagagactggggtagcattagtgtactgagcacccgctccaaatttcgactgcccaggtaggtggcggcgcggtggtactgagggcccccgtagccaggcgcgccctcagacagcgggcacgggcggacgcaagggcagcaagaaatacagcgcttcgtggtggtataaaaacgagacctttactctggcaataggaattcacatttcaaaagctgatgattgtcaaggcgatttaaaaaacatttttatgagtgtaaaaaatagtgttttaaagttggccattttctaatacaaaatgtttctttttaaatagcctttaataagcagaatgtgtgattgttctttaattggttctctttaaaatgtgctggaagacaaagttcgaggagcactgtttcaagcaagagaaaaaggggacataatttaaatgaaaatgaaaatatgcagtaatgcaatgaaaaaaccgtttcctagatttagttgtaccgaaatacatgacatcgcctgcattttgtgactttgtcagtagtcacgaaggtaagtactactttggggtcagagagagcctgttgagataaaatctcaaagctgttagaaacattttaagatgtggaaagataatcaacaaaatcatttacataaaattagtacttagcagatgtacacatctgcaaaaataaagtgagtttggaagcaaaatttgaacatttagcaataaaattaagacgaaattgctagccagtaagagcttaggaaactggatatccttagtgagatagaataaacaagatcaccacaatgatgttttaaaacattaggactcctgggttaactggtctattatgatgatggaactgcagaataaaaaggttgtttgggcaccacttgtcttagtccttttgttaatttgtcatttttaccagtaagatcttcaatttgatttcacagttccatgatgaagaaatattttctgcaaagcaaattactgtaaatagggtaatagtaatacatttggccatgatttaaattctgcacacatttcagagagaacaattttacaatgttaagttttaagcaaatgcttatttcatgcagttacaataagtttaggccaagcactttttaaaaaggcaaatatgttcgaattaaatacttagccaaaaaaggatttcattatgcaagactgataatacaatctcaaatactgacagaaattaaccccaccacagcaaattataaattcaaagcttaaattctttcattacactgaaattgctaaaaaaaaaaaaaaaaaaaaaaaaaaactttgcataaaatagtcttcaccgagttaagtatttcattttatagttacttgttgaggacataatatactcaataaatattataaattaagtgtaaaatttgaactggaaagaagtttaagcatttcattagagctcaaaaatcaaaccccatgcacctaaaagtaatagcagtttattaggaattcttccctttctcacctgtgtatcaacatattggggatcagtaatttagatgaaagtatactacaaaaggagcaaaggacacagacttagtaggttagaatattctggcttatgctaaaaaacaaaaagccttttttttaaaacagacatgcaaccacaaatttctcaagtattttagacacttggttcatctgtataacaaaaaaaaaaaaatgcatttgacttaaaaaagaaatagaaaaccctaggtttctgtagtttagtttttcagatttacacatgcaaatcatatattcagatatttttaaatgggaaaacaacttactttcaacaacttaatttttccagtaacacgttactatgttaaaaagatgcgacagtatattcatttaatctggcaattttaatttcaacaaatacatattaacaacaaattaaatcctattgtaaatacacttctttgttataccacgaccaaattttctaatcctagtacaggccacaatgaaataggccaaacatgctaccattaaagtttgttgggatgagattgtagtaagtttactcaaagtattcaagttctaatttttaaggtgctgtagagaaacataaaagatttcactgtatctaaaaatatgactgttttgatcttaagctatacattttatttttatctaactgattaagacctgcctcttaatgaggcacatttttggcatttctgtaaatgctgctacatacaagtaaaaataaggaaaagccgtgatagtaacattcatagctttcatagaaaaatatatattccctgaattagtcatatcaagtggtcattcagtatgaactgcaatattataaacaaaatgacatcaatggactttctctaattgcctatttccaacactctacttcagaactcaataatcagtatctccagctgaaattcccaggtcctcctagtttgtttttgacctttggggatgtgaattgtagggaatggatctgggtagtttttgcttcactcagaagtcaaataggcccattagcacttcctttggaaaaatgcctgattttttttcctcatgacaccatagttgtcgtggtctgaatttttacactgtaatggagaaccctgaaaattagcatcaggttaagattttgaaatttgttcacttcaagttcttcctagcctgtacacttcccattatattcttcctctaaggaatcatgtcttcaaggccttgcattctggaaaggaatagtagtcttatagcaggccatttgtcttttctttccacctctccacctacagactctgcaatttatttcctcctcagaattccccagagcacatgtctgtacaagagctgactgggaggaacccactggattatggcttttagaaaattcctccaaagatgccaataagggagtaattttagagctgggagcagaatgtaactgccagtttacttgtgtaccaattgttttcagatgccacttctacattctcatagtcactattgtgcattttctttccaggatctgaacccccttaaaaaaagcatttttctattaatatcttctagctctttttcactttcagaatttatggttgtatcatcctctttataaacattcagtaattttttcttagccgcagcagaagcatttcgatggggcagttttctgctactcttcctaatccagacattttctggtcctgagatcgtttcttttagattactcattatctttattttatttgcagcaacagtagcacatctgcggggaactttctcaggtaccatttttgctttcagagtttcactaggcatctgcactgcatccttctgattatgcatacatgttctcacttttgtattgggttctctgtctctaggaacaaattctgaaaaatgagtgaaagttcatgtaaatgcaaaaatcttgtaacacaagattttactactgctaacattcctcaacaacactcattcggaaacaataaatttaaaagtcatattgctaaatgataaattttaaaatgtgatactaagggcttcttcacattgatataaccttacatttgcttatctacaactataaggatgtcacttaaaacagtagcagacttgtaagaatggggtgaaaagttccttcagcatcggcatcataaagctgctaatctaaaaacatatatatgagcattttacataatttgaattactaaatcttaacttcattgttccagtattttctgacctaggtatgtgacacacgagattcagattaaaattctaaaaaataacacagagttgctttaaggaaccaaaaagtgcagagtgctatgagaacacagactggaaacctaacctagcctaagggatcaaggaaggcttcctttaaggaagcttttagacgagaggtgaaaattgtgaagggatttgccagacaaaaagcactttggagagttaactacttcatgcagactaaggcagtttttagagggggcttgaaatcacactggagctctacacagccacatgatgccagagctactactccgtgctgaccaaacttaggagggctcagatatgtttgttaccagtgtctcaaagccaaattttcaaatttcacaaacaagtctaattagtactcttctagaacagaagtgatattccttttacgtatctgaagttcacgggcccttgaattttaggtctttcttgcagccatgaacagtcaaactatctaaaactgccttcatggtacacaccaatcttgatggcagtttgttttgtaggaccctgcctgaagtttccagacatttagcattcaaaaggtaaggctgtagatcactgaaataaccagttgatatcctccacccacactagacatctggaggactccaccacattctttttactactaagtactagaaaatgagagctcttttagtcagatactatcaagtaacactattattctgtagcaatgaaaccaccaatgccaaccttctgaactttttcttctgtgaagatgtttgcccttctgtcacaaagctgactgaagggcagatgagtacaggtaaaaactgcttctgtggactgacatgttcatacagctagactaatgaggcaggcctctgccctcacagtgcaagcacttcagatttttccctaagtctatgaaactgatttcacacttctctaagatcagttgagcgttctccccagaataggttaggaaatactttattcaaagcaaccccaccacatacacatcagttccttttgccaactaacttatgtgattcacatgtttttccagtgaaattctaagggcactatgttttgttcagtgttcagtctccaggcattgtaaatggcattttaccagagtaagacactcatcacggcattactctcatgcagcatgcccttacctccttcagctggactctgtgggaagagaagtggcttaaagtgcactgtgtttaccacttcaaagacacttctcttgggaattttaaaattatgaactagtatctccaacaagtcaaccctatatccaaaatgaatctttaacacattaaatcaatgttagcaaatgctaaaatgtaaatatgctacaaagggtaaacaaaaattttaaaatatgcaaaattaaggtgaaatttgcactttatagtaggatgagaatatactattatcaactagctgcaccatttgcatttggaagaaaagaacagataactggttcattcccaacaacctattcatccagacaaatagataaaattctatttcaactacaatttgtaacaaaatgctttaagttgcagaaattccattttgatgtgtgatcaaagtacctatactgacaatttaggaacctagtaaatactaattctaacacattttaataaatgtttatttgtcatccagaataatggaaaagttaagattctgcaggaaaaaaaaaactaaaatcaggtttttaaaaaatacttaaggaaatttgaacttcagtaactatgcccaagggagggagaatttgaattacactgtactctaacttgataaagctgaatctcttaagtcttagacaataaaacaggaatttcagagaataaggataaaaacaatctgaggaagacaaaactgtggagaatttttttaaatacattcaagtcagtgttaattttattactgaaaactgagtaaattataaagtgctttttctcaagaaaactacaaacagttttagaaatatatataggatatttcagggttagaagtcaaatttgtgtgttagggtacaagcttaagaactctggatgttgctgctctaacaatgcatttgtgatggtgccatgtgatactaagaagtcagtagaatcccaccagtcctactgcctcagatgagtcttgtttcagtcatgggtttacaaagtcattgagtgcttgaggacttgttttcctggaagtgattccctacttgggtatggcaagaacacatcagtagtgtaaaactgtacatctgtagtagcactccatgatcatttccctggatgaccactttaaattataactcacagatatgtgtgtattctaagatggtatatgtggtgaatagaaacctggatacaaacataacagttctgactcaacacaatctctagtttctacatttcaaggattaatcatattctaattagacttttttttaatttttaagctaccttatttacagattctgcacaatatttcatcatacaaaactgttttcctaaattcaaagtaaactgcatatggttactacagaagcattataaaattttcattggcatttttaaaattggagcatttaaaacagatttgagaatgagaaaagaatgtctgactcaaaatgaaaacatactagcctctttcataaactcctagaatcttgacattattggttgctgtggttggtggataaatcaaatccacaaagtgggtaaaccctctaggtgcaagttataagctccctcaagcaagccttttatcagaaaagacttgagatattctctcctctgtctgcccttcattgataagcaatgaaatgaccccaaaactcagaaagcaaataacatttatcaatgatcttcatccctcccaaagcagaagtttccaaaaacatcccataaactgaagtaccccaatggctgtagaataaaatggtttctgtaacttgctgtgtttttaaacagttccgttttctagggggagctggtaacactgcagtatggcagcatcaggtcaaaagaccatcagaaataattccatgaactagttcattagcttattcatttttagggttcatttactcaatgatgggcaccacacaactctgaatttttgttcttattctggaactacaactaatctagctcatcacaatacagttttctctcacccctagaaaaactcagatttgtgatggctattgcaatttttaataaaaatctcataaaagccttattttgaaatatgaattcagggactttatacttaactgcttaatttgctttttagaagcaataccttaagagcatttcacactaaatgcaggcagaatcagaagtaaatacttgttttcaatctaccctattactgtactactggaaagaaaccaggccacagacaatccaatggcaaaccccttttccagcagggctcctgactcgcttcagttcccctatccaagctcatatgtaaaactcacagcgctcgcacccctatattctgcctgcatgaaaagaaattaccagtggaaaagaggttggggaaccacttgggacaagtctggaattaaccagctagaatgtatttggcttggagtagtgttttgttttgttttttaactcttttgcttgttaagatgaaaatgctaaatttattatatcccatttaagaactgacaaaaatcatctaaatgaatagattaatttagaacattaacgatcttatgtgaagtggaaaactaaagatctgcttgacaggctcatgtaattttttgattgggattttgtaggtgaatatatagttgcagtccaaggactgattcacatttagaaaattaacttgaatatatcaaaaattaaagatccctttaacttttacccactgatcaaaaaaggtaatttttaaaatgatttaccttgtaaaacaaaggggtagagctgctacagtccatctaggctctatatactggtcatctcatttcagttaggtcaattggactgcctcttctctttggcagtctaaaatctcatttaagggctttaataaatgaaaaaacttaccttaaaactgacataactaaaatatgaccagaaagtataccatagcattgataattaaattcaaactattggtcttgccatacttgagaaacagatgtatagtctaattatttacatgttgccaaagatagagcctgcagattggtagaatccaaatgatgtgactctccccctccctccatcaaatctagaaaagcaattcttgagcagacaccaatttaaagatatttttctaccaatttaacaatatattaggaaccagcttggcagattatgaaaaaggtaaaaatctcttacttttgagaatccccatgtatccttgggcaacatctctgtaatttaacagcctttaaaacttaaaatcgtaagaaaagacaacacagcccttagcattacatactttacttttcaatccttactattcacagtttgagctaggaattaacatttgctaatctagttggactcagtttttcccacaatgctctattttctcacctagttttgacaaatttattccttctcttcccaaatactaggataagagacagtctcaaactgttaagttgcaaatttcttggggtttctgctttattatttccttgatatccacagcagaaattcagaggtataacttcaacattaacaggtgaaaagttctacaatgacttgttgcactctatcacattaaaataattgaactataatttccatacaacataagaaaactacagtatttggtgacaactgcaagatacctgataaataaatatatcaacttactattcatgaaaagaatggagctggttatttcagctttaaaagggcaaagcaaaaagaccattttctagccatttaaaagttactcaaaaaattgatacaatggagtggaaaggaaaacaaaaaagatcgtaagcacctttaacaatgttcttgcattctactgatatacaaacctctggggtttcagttggcacaatcaagttcaacttgtactaacagaaaatattaaaattcttcctatttttaatatcaaacagggaggttagtaaattgttttctgattcttctacaaaaaaaaaagtctagaagacagagggaatgtagtgtgcaccccttattctaagtgataatttttacttacgaggtcataacgagtgcaaagggcttagtgatgcatcttattctttacttttggacagtaacaccctcagatggtatttttattggtttgttttatattccccttttccatttgcccttctgttttgaagtgctttttcttaaaacttaagttctttgcctccattttcttataaacccaatttcctctttaggtgcagctctactatttgaaaggaacctttctgttgtaatttacaagctgtgagtaactgctatatcattgtttccaaggattaataaactgagaaatgatttaatcagatatttgccacttacaaaaagggaggctgaccttaggaattatttgaatatgggataaacttttccttttattcataagttacttcacattgtaagtatacctttttaaataaggaggacacgaaaaaagaaagctttgttaacactcatctatcttgtcaatgtttgaaatcatttttcctttatatgcttggtaaagtgagtctttccaagaaagcaaaaatcaaatctgagtacttcaaagcctgtaaaaccataaatgaataaaaccataggactttggacatacacaaccaaagtagtttttgtttttcacatacaccattaagttgaacttcaagtgcagtggaaaggtacagcacttatttctggatcagttcacattcaaattataaccctttatctttttctcaagaatactacaaactgaccctaaacattaaagtacacctgtgcattaaatccctgggcattttgcataacgtagaaaaaaaaggccaaacatgttctagtgctcaatgtaaacattttaactattaatgatttattaattttccttaaaggtacttaggagtgtgtgtgtcacatattcaaagttaaccttaggaatagcaccataaccaaaaaaacccataaaaattattttctccattatctctcagttttatttcataacttgagaagctaccattgtcggctatgcttttaaagacatcaggtccattcttgctgcttctgatgaaaccaaatctgattaaaaaccaaaataccacttctgtatgcaagggtctaactattttggactgaaagaaaaaatggtaattggatggccagtcaatgaccaattaatgcagtccaaataatcagaatagttctattaatgaagcctaaactgtcaaaatattgttttataccaaaagaatgtatgtacttatgaatgtattccatatttatttatggatttttttggtacctttttgcaaatgatggtaaacatggagttaaaacctgagaacagattataaaagagaaggttaagaagagtttaaataaattaatggatttgacatctatcaccagtttttaaaattagcaaagtaaaaggcatcccattagtcttttcagtcttagtcaaggacaattatcatgaatcaatctgtttactatctacttaacacaagttctgagaagaaaagcatcatagttctgaaatggtgatagctctctaagccacaaatgagaggaggtttcccacctatctcagttgataatgtccaaaaacatccttccccatgcatcagagtagaaagaaaatgtaccttctactatgtcaaatggaatagataactacaaaataggaacacttcagaacattctctaacattaataccagtctgatgcttcgccttgtctgccacttcaaagatacacaggagaaaaggttttgtctgaaaccaaacacaattagggctaataaataacattgtctaatattgataccagtctgatgcttcaccttatctgccacttcaaagatacacaggagaaaagggttaattttgtctgaaatcaaacacaattagggctaataaataacttacaggtggggtactgtaacatatcccttacccactaaatatgtaaaccatttgaatcaagtccatcttcaggcacaaacaagttaggaatggccatctacactggagtagcataacctatcaagtatttggttagaaaataagtgtactatttgtgtgataaactttcactttaaatggattataaaattattttcccacaaaacatgacagtttcttatatttggactagaagtcactaataaagatacatttagttgccccagcaaagaatgcttaggattgcacatggaagcagtaaactaaaacaaagagatggagaatgacatttagctattttcctatatagataagatttgcaattgtactcttaacaaaactcacctctacaattggaatacagatgggggaaacctacatattaacttaaatactcttttagccctgtacactctattaaagaacacacttctaaatctaaggcacacgaattcctctatttcacagagtaagattatggaagagcaagattttggttaaatcccttacaatggaaaccaggagatcttggacagaagacagattatatagcattttgttagtgcacaatttaaaagaaaatgctctgactatgctctggtcctagaggtttaaaacatgcactcaaatcattaaaaataatttaccagcactttataaattcaagtttataacataaaagtgacaacgttttccttaagaagaaaaaaacccaacagcacttgggaagaaaattagaaaccatttcaatgaaagtgaccagatctggtataatgcattctactcaagtagccaggggaagaaaaaaaaaaaagtggtaggtacctcgcctactaatcatggttacacctcccatgattatagtgtcagtatgcatgtatttatgaagaatctgtaaacataggttgtgaaattgttgtaactactatagaacaggggttagaaactactgcctctttgacaaattcagaaaataactgcatgacacttgctgccatgaaagtaatgctcattggttttgataaccaggatgtctagtgtttaacatatttcaaactcttgctatatgtagtcaaatactgtcaaaatagatctgcccccaaaatgaagcatattttggcacctgtgctgaatgctgctacaaagaccagcaagtgcaaataaaaataacagtcatgatttagtcacattcataacttttcatagaaaaatataaatatattccctgaattgtaagacaaaaaaataattttaacagccagctttcaccataaatgccagtccatttcctcttaaatgaactggctttccctcaaggtcataaggtgcaaccattgaaatctaacacattttctaaacttctgtcatcatccccatcatggtatctcacagtccttctaccctgatttctcgtttttatttttgaacgtcgaagaactcttttagattttgcatagtccaaatcctcccagtcattatcatccacacttaacctagggcgtttgctttgtctttgacgtctcacagttttagatatgttagctgtaaaagttttaccttttctaactacttttgcttttcctttcgttttcctccttttggtttttgtattatcagtacagtcaatatctgattcagttacagatcccaaatctgatgatttggaactagtatcaggtctaaactttgaattcccagttgtttcagagattttcacattttccaattcaggatgcgatctcttcctttttacttccttctctgctgtttcctgtgaatcatgaatcacttttgtcttactaaaaggagcctttccataggtcctgagtcttctgccattccacctgcgcagcccataattcagttccacttcaaaattattctctgcagtagctttttgtgccaaggttgactctgaagaaaatgtcctatcagtctcactccctggaatatgactttttgaatcttctcctgaagatgtaacagaggaactttttcttttagaaggtgcatctattttgtgaatattggtatgcctgtgcttgtgttctgaattcaacatatcttcagagtctgagtctccatttagagcctgactaagcacttttgtactaccttcggagtcaggatcaggtggcttgccttcacaggcatactgttcacttggtacttcacaatgtacacttccttcacaatcactcaatttcttcttagctgtagtacaagcaagatggagaggttttttccttccatttttgcttctagtgtgcacattttctaaactgacatcttctacatcactcatgagcttgatcttattggcagccgtagctgcacatcttcgagtaatcctcaggagacctgttctggcttttgatgatttcttaaccacctgtaaactactgtctgagtcactggaacagacccttttcctggaaatttttctgcttagtccattgtcttgtgatgcagaatctaaaagttaaagagcagatttctattaatcttttgtaagtctaaaggaattatatgttcaatattaaaaacaagttcagaattcgtattaatttgaagggggtattgcagtgaatggaatggtacacacctattagtatagtcatatgttgctcaacagcaaggatacgttctgagaaatgcatcgttaggctatttcgtcttaagcaaacatcacagagtgtgcttacacaaaccttacagtacaccctactacacatctaggttatatggtatagcctattactcctaggctacaaacctgtatgacatgctactgttctgaatcctgcaggcagttgtcacacaatggtaagtctgtgtctgtgtatccaaacagaaaaggtaatgcactgcactaggacttgaggacagctatgattacttcactaagcaatggaaatttttaaccttcattataatcttatgagaccaccactgttatgcagcacatgactgtactttaaagcagtaactttttcatcctcagcaccattcacaaattcaacacattctcaataacatcccatgatcttgacactataatattaacatgaatacaactaaactgtttaccatagcactagcatatgcaaagtaatcacttaacactcagcctctctgaaactccccgtaactccccaagctccaatcacacaattacttttcatcttagttttagctgtcttctgctctacagtattttatcaatccccatgtaccaggggtacaatcttaattcaacaagttatttcaccactttgtgctccagttattacctgtaaaatgaacaataatgctagtacctacttcataaaagaaatgaagactaaactgcttattaatggaaaacatttagaaaaacttcctaatagaaacagctcagtaactgttttatttgctattactaacatctctttttattaaacagtcctaccctttttgtctactacttaagctatcaacatcacagcttataaatgtgcccctctctgctttattcaagcccatctctaatataatatatccccatcatcaatacaagaagtgaaatcttcaataggcatagttcttaaggccaagattgcctgttaggtgaataaaattatactcaataaaaagttacgcatgcacataagaatataaaggatgaacagagaaggctaacacagaatgcatgggagggagagaaacagcaaagagaaaaaagtttcaagggaaactttttcggggggaaaaaaccaatgtgtgtaagagaaaaggatggtgagagtcaatcagtgaacaaagataaatgttttgaattacctttcataaaattgtttggtttttctattttgtcatcatctgaatctaaatcagtttcacatccatgatctgaggaacactgggacatagcaatagggtcacagttcagatttcctgaaattgggttcatttccattttatgacatttcccatcttctctatcttgctcttcagattcagagtcttctgagtcactcagaatcttggtttttttaaagaaactcgcattcttgtgaaatgtattgtatttcctaccaccagatcttcctggttcagaatctgcttcctctgagatgctctctgccttaagtttctgcacagacgttgatgggccagcagttctgttacatgcatgatctgaatcatgacttttagagtcttcctcagaagactctattttaagaaattttgtctttgaaggtgctggagtatgggacttgtaaccattagcatgccaatttttccgggctacccgcaaatcactttctgactctgagtctctgttttcagattcatcaacattgctctgggcagtgtgagaactggacactggtaatagttgattttcatcttttagctcctcttcttcaatttctgactttaagctctgttcatcttcagaattatgtaataacttttttctagctacagcagaagcattgcggtgaggcagcttccgaccagaacagacactttcagagctagaattctcttctacatcactcattagctttattttattggcagccacagcagcacacttccttaagacttttcggttatttccagctctggcttttagaatttcaccagtctccaatgaattgttatcagaatcacttaaatagactctctttcgagtggcttttctgccacatccatttgctaatgaaacgggacctagaaataaggttaacaataagattaaaaagattttccttatttcaacatttttaaatgactattattttaatgattttcttcacttttttggggggcggggaggagacggagtttcgctcttgttgcccaggctggagtgcaatggtgcaattttggctcactgcaacctctgcctcctgggtgcaagcgattctcctacctcagcctcctgagtagctgggattacaagcaccagtcaccatgcctggctaattttttgtatttttagtagagacaaggcttcgccatggtggccaggctggtctcgaaactcctgacctcaggtgatccgcccacctcagcctcccaaagtgctgggattataggcgtgagccaccgcacccagccttttcttcactttttaatgccaaaattcatttccttcctaaatctaaggaacctaaaggacattaacttaatcttacgtagatgcattaaatcgagaatctattcaatttataacttttggattcttttgatatacattccataaaagtactactgagtctcttaccagtttttctttgagcagctctagttctggttaccctgagattgctgcttctggatagcccactgcgtgaggaggattcacgagctctggaactctctttgctttcctcagaactactggaagctgacgatgacaaagaggtagctaaagaatcttccacttcactttctaggaaaaataaagtgtaaatagttacatatattctcctgtctttacacacataagcaagcagttcataacattactctgaacattacataacattactacaaaagcagattcctaaaatgcttagaatatattttttaaaaaccattcccaaaaaaagctgatgaaatttggagtattaaaaggtacataatcagcattccaaatagtttttaattatatttctaaaaataacagattaatcctagtgtagatttacaaaatatagtttatgtattttataaacagacttccaattaaaaatttaattagctgcaggccgggcacggtgactcactccagtaatcctagcattttgggaggctgaggtgggtggatcacttgaggccaggagttcaaaactagcctggccaaatagtgaaaccccatctctactgaaaatacaaaattagccaggcgtggtggcaggaccctgaaatcccagctactggggaggctgaggcagaagaatcacttgaacccaggaggggaaggtagcagtgagccaagatcgtgccactgcactccagcctgggcgacagaaagagactctgtctcaaaaataaattagttaaattaattggatccatgtctactcccttctgtgatatcagataggtatttcatataaaaaagacaccatcatttcaattccagcatttcagaagacatagtttgcatgtctcaccatccttttacccattcctaacagcacagtaaggtcatttcttacataacagctacacgagagaaagagtgtgagagggaagaaaagaaaactggctgtgataccaaaatactagacaccaaattgtggttcatcctttgaacttgttctactgtttgcccacctcagctactcctgtcaactctaccatccatcaccttgactccctgtttttccaggctcttcccctccctctgcacatcactgccaaacttaatcttcctgaaacataatgtgactctgtcactcaataaggaacccagttcagtaatccaaactcttctgcaaggctcgaaagttgctaaactttgactgtactctatctgtttgatcccattgtttgtaacattccccaaaacggtcttttcatttgcacaaaatgcatccttctttccttcagtgcattttctcatagttgctactaggctgtaatgtgtccacttatcactagtgccattttcaattactccagcatactctgattggacattccatgctatgaatgtatcccttaaaacactgtacagttctaatgtgatacacatgaacttgcttgtctttctccacgttttatcacagtccacttccattccaaacttttatctgtatgtatatttttcaatgctgtcaatactatttattgaaatactaggtaaaagatatgtataaatgattcaattataacagtaaatagtatgctattgtcataattcagcaaaaccactcagagcagtacagaaatagatacacaccacagcctcatttgtacaatgttaacaaagttagcatcagctacagttatgctaccagatggcaacaacatgaacagtttagaatttactacgtcatcagctttgaacttcattgattcttagtacttcttaatttttaaattaaaaagatacaaaaacttcaaatgctgcacaccaagtgtgaagaatctatgtatcatgtaattgacaattcaatataaatgtaccattcacaaagcatggcacttacagaagataaccgaattgttccatgtttattatgtttatctcttccattaaactgtaagttctttcagtgtcaaggccacatctttatattttcctctaaatctctagtaacggccagtgttacacatttgggtgctcagcaaagaaataacatagtatttcacttctcaccagataatgtagaaccatttgttataggtctatttcttttcctcctttctgatgattctgctgaatctgaagagtcaccagaagtaacacctgaagagataccagcacttgtcttgtgggttccaagataagctgtcctacttgaggtagactgggtaggagaacctaccaactcaggaattatttttgtctgagattttaacctcttcggcttgaggtttctggccaaacatatgaacaaaggaaacagtatttaacaaaatacaaagataattggttcacagagaatgactaaatagaagtatatcatatttcttaaactgagagtaattttatcatcaaaacattaaaatattcactattaacattttattctggcactgattagtagtagtatttcctaactctaaatttaacgtactgttattcaaatttggagtaatgaatcaatgttccaagtaagagttacagaaaattatttgaataccttacattctttggattaaatgctaagaggaaccaacatttacgtaatataggtattcattcatactaccaatgtaagcctcaataggacccaactttctcctctcttatttctatgtccctaaagacagaatatggttaagaggagaaatcaacaaaacctaaacaggaaaagttaaaaaaaggcatcagaacaaaatgatttttgtcccaagaccagactatttacatctaactgcacccattcaccatggttggccactaggccaggaattatgagaaaggagaatggaagtttaaggcatgtgagaaatatgggtgaatgaatattgagataatcctattttcctttaaaacagctaagaaatggccgaacatgcctgtaatcccagcactttaggaggccaaggcaggtggataaattgaagccaggagttcaaacactagcctgggcaacatagcatgaccccatgcctacaaaaaatttaaaaattagctgggcatagttgtgcacatctatgatcgcagctactcaggagacttgttttagcccaggagcttgacattacgatgacattatgatcacaccatgcactccagcctgggcaacagagcaagaccctggttcttttttttttttttttttttttttgagacagagtctctgctcactgcaagctccgcctcccgagttcacgccattctcctgcctcagcctcctgagtagctgggactacaggcgcccaccaccacgcccggctaattttttgtaatttttagtagagacaaggtttcaccatgttagccaggatggtctcgatctcctgacctcgtgatccacccacctcggcctcccaaagtgctgggattacaagcgtgagccaccgcgcccagccgaccctgcttcttaaaacaaaagcaaaacagccttttaagtggtatctagacattgaagcttaaagttaatcacaattctttaaagcaataattgtcaaggctgtaatatcaaaaattttaaatgccgttaataatcaagggagagaacaaaagtaaatataaggctgggcacagtggcttatgcatgtaatcccagcactttggaagcccgaggcaggtgggttatttgaggtcaggagtttgagacaagccgccaaaatggggaaaaaccccgtctacaaaaaaaacaaaaaaaaacatcggcgcgggggcgcgggcccctaaaaccacagacacgcgagacgcagacacaaaaaaagcgcgaaaaccggagatggagagggcacagaaaacagatagcacaacaacacactccagcctggacaacaagagcaaaactccatctcaaaaaaaaaaaaaaaaaagtgatctgataccaccaccacctaggaaggggatggaaggaagctatactagagccaagttcctatatgtactgtaataaaaatagtattaatataaaatcgattgtttgcaatagattgagatgcatagtgtagtccccagagcaaccacaaggaaatcccatcaagggatatactgcacagttgaaaatataaatggaaacaaactaaacattgcacaactcaatttttatactgtaacaacataaagtacctataaatgtgatattaatctaaactacatagtcaaagaatatagaatgtaaattaatatacaattactgagaaagttaataaatccttcattttacatttctttacaaataatcctcagtaatactgaggtacattgtatcaagggtacattttcccttacacaatcaaatgctcaaaagaccatacataaaaatcacattattctctacatagcagtccccaagctttctggcaccagggaccggttttgtggaagacagtttttccatggactgggactggggccagtgagtgggcagagttcaagacaaaactgttccacctcagatcatcaggcattagatcctcataaggagcacacaacctggatccctcgcatgcagttacaaaaaggttcctgctcctatgaaaatcgaatgcccccacggatctgacagcagacagaactcaggtggtaatgcttgtttgccagccaatcacatcctactgtgtggcccagtctacacagggagcaggtgctggggactccgactctatattaaagagccaattcttatgcaaaatacaaatgacactttaaataatccttaataagatttgaaaaaatctataattttacatatttatagaattacaaaccaatacaacagctctatattcacagaaatgctttcaagctataaaacccatgactagtcttttcagaatgtacagtactctaaagattaaataacacagtcttaaatttttaaaaaaatgcatacaggctgggcgcagtggctcacgcctgtaatcccaacatattgggaggccaaggtggaaggatcttgatcccaggagttcaagaccagcgtgggcaccatagcaagaccccatctatacaaaaaataatttttaaaaattagccaggcttggtgacacacccctgttatcccaactactcgggaagctgaggtgagagggactgcttgagaccagaaagttgcagctgcagtggtcatgatcatatcactagaccccagcctgggcaacatagtgaaaccctgtcttaaaaaataaatagggctgagcgcggtggctcacacctgcaatcctagcactttaggaggctgaggcaggcggattgcctgagctcaggagttcgagaccagcctgggcaacacggtgaaaccctgtctctactaaaatacaaaaaattagccaggcatggcagcatgtacctgtagtcccaactactcaggaggctgaggcaggagaactgcttgacccgggaggcagaggttgcagtcagccaagatcatgccactgcactccaacctaggtaacagagagagactccgtctccaaaaataaataaaaaataaataaataggctgggcgtggtggctcacacctgtaatcccaacattgtgggaggccaaggtgggtggatcacctgcggtcaggagttcgagaccagcgtggccaacatggtgaaaccctgtctcttctaaacatacaaaaattagccagatgtgatggtgtgcgcctgtagtcccagctacttgggaggctgaggcaggaaaatcacttgaacccgggaggcagagatcatgccactgcactccagcctgggtgacacagtgagactctctccaaaattaaataaataaataaagcaagcttgccataaccagtttacctgatacttttgttaggctgactgtcacctttacaattttgccgttgcttgaacctctggcttcttcgaagtttttcattgaatttttgaccaattttaaaatcagaagagattttcttcattttttcttcaaataaggcagataatctcaaggtcatactataaatctgcaaggatataaaaacaaagtagaattacaaaatagccttaaaagtacttaagaaataattgtaatcattgagatcccttgcaatgtattatatcactgcttataggtaatggctgtcacccacttcttctgtttccaacccccttcccttaatgacatctggaagtaagaagtatcaaatacatacctctcagatgataagaaagtagtttgaagtcaagcatctatattcaggacttgtgtctatatgtcagtgaatctcaactgtttttgcctattctaacatctgtatgtacaaaccccaaaatatacccttctcccaaagttagatgggaagttgaatggttttaaggctgctatttaggctacaaaagcgctgtctttctttggggcaagggaacaaaagcacttttatatacccatctctgtctgcaatctgttttcaatgccacctaattctaaaaatgaaacaaaaataccttgcatccagtagcagaaagtataacctagaacgttaatgcatatgaaagatttgttttaacaatgtttacaattaaataacatcaaatcttaaatacttttggatacagctatgtatgtacagaactactctatcctcctccacgacttttcctgaaaataagtgcaaaagtctaatgctcaaaacttaaatataattcttgtgcatggcagtggatggcgaagacactccaataccagaaaacttttttaaaaagtatgtgagatatacgaatttcttacatgcttctcatatacatatatatatgctcacaaatgaatgtgaaatttgttatacttaatctgaaatgatctttgacagttattttcagtatttcatatatataaattttattctgccaggcacagtggctcatgcctataatcccagtactttgggaggccgaggcaggcagatcacttgaggtcaagggttcaagactagcttggccaatatggtgaaaccccatctctactaaaaatacaataattagccgggcatggtggcgcaagcctgtagtcccagctacccgggaggctgaagcaggcaaattgctcaggagttggaggttgcagtgagccaagatctcaccactgctctccagcctgggcaacagagtgagacaggctcaaaaaaaaaaaagaaaaaaaagaaaacacacacacacacacacacacacacacacacaaacaaaactccaaaaacaacaagtgttggcaaggatgtgaacaaactgtggcttttatacactgccagcgggaatgtaaaaaggtgcagccaatatggaaaacagtgtagtggttcctggaaaaggtaaacatgaattatcccatgacccagcaattctactcttaggtctatacccaagggaattgagcagggtttctgagagatacgtgtattccaaaatttgctgcagcattactcgtaatggtcaagaaatagaaacagccgagctggccatcgatagatgaatgaataagatatggtataaccacacactttaatattattcagccataaaatggaataaagttctgatacatgctacaacatgcataagcctttaaggcattacactaagtgaaataaataagctggacacaaaggacaaatatggtaagatctcaatttttatatgaaattatctaggacaggcaaattcagacaccgaaagttagaggtttccaaggactgggggtgaggggaaattactgcttgatggttacagagcttctgtgtggaatgatgaaaaggttttagaaagattataaacgatgccactgaattgtactcataaaaatggctaaaatggcaaatgttatgttatatatagttaaccatagttttgaacaactgacaatgtactataccaaaaaccactgaactataagctttcaatggtgaactgtatggtatgtgtcctcaaacatgtatttgaggggcgcagggaagacttgaatgaaatttattttgtcgctgaaaaaaaacagtcttacaaatggtgactttgacaaaaatccaagcttggaaacgttagccttgaacgttaaactgatccagcaagcagtgtggatcctgaatccaagaaagagttctcaaattgagaccagaggcagtaatgcaggaggagtctaatattaagtaatgacagggaaatgcagttaaagcaaaacagttaaatgtcactgattgtagacaccaaaaaatgttgtaagatcaaacaagtattttactttaaatatgactttttacaattattcaacacatgagctacctggagtcttgctctgttgcccaggctagagtgcagtggcatgatctcagctcactgcaacctctgcctcccaggttcaagtggctctcatgcctcatttcaagcggttctcatgcctcgtgcctataggtgggattacaggcaagcgccaacacgggctaatttttttatctctagtagagaagggggctcaccatgttgaccaggctggtctcgaactcctgacctcaagtgatctgcctaccttggcctcccaaattccagggattacaggcctcatcaagttttgaaaagttacccaatgtgtaacatgttaacaaaactttagtaaccttctactgaaactgcatgccccaaagagttaaagaagtcaattaacaaaaattcttaagtttacaaaatgacaaaaaaaaaaaaagaaagaaagaaacccaacctactataaaacactaaaactccctctgcttatgagataagaagaactggctgaaactggttaaaaccagtatggccaagtggagtctgcaaagaatgagcctgctgacatcagagcctgaatttccagcatgcttcacactaacttcccccaaatttgcacacgcaacccatcagataacataaagaaataactatacatgcccaaagactttccagacctctcctttccttccattaatcacctgctaatctcagaatccatgccctgaaccttttctttaaaaaaaaataaaaaataaaaatactgctttaaagccagcaccggagtcagatttgaaattcactcctgtctccttaggagtcaactttcaatataaagcttattctcaaaaacccagtgtcaccacttcacttgagtaggctagaaaaaaaaaaaaaagaaaaagaaaaaccctgtgtcataatattagcttctaacacatcaagcaaagagcctccactggctctgtaacattatttgtggtcttaatctgatagctcatgtgttccttcttcaaatccaaatgttcttatgctgtcagcagtctcacaatcagattttcctttttacttttaatattcttacagtctcgatctatgtttccaatccacttaagatccttatacatacaaaacacagagactcttactctgtgtatcaaatttgttcactttctattgatgcctactcccattaatccccacttgcttataaaatttgaggagattatgataaacatcaactgatgaaaggcaaaaactgaagctatatgagcagtagcagaagctcttttctttataatagtcttaatttattcacttatctttaatgttctaacctctattacacagtggaaaattacactggaaaaaattactattacattggaaaattatctacacagatcaggcagtttttttcaataaaccacataaaaaattacctttgatcttttgtttggtgtatacgcttttgcattgctaaatatcagccggatgtctttgcaaaactccaaagggctgtcataatttcccgcatctagagtttcccttactgttccaaaatccattggggtatctataatatctctgtagtcctaggttttaaacacaatatttaattcatagattcatttcttgcttttagaaatgtaaatgcatcagatctctaaaaaatgtgaaatgatggaagagaggaaaaggttagaggactcttaaaattcattagtaatgtttaaaaagaggtataaaaacaaagaaaagatagaaatataccaaaatgttaatgtctatttattgttagtgacacatgggatggttttatttcctgctgtatgtactccaagcatcctacagtcactctgtgctgttataatccaactttttttataaagtcatctttcaatttccctttttaaagagtgcaaacagacacgtttatccaattcacagttctcctagtgctgggcctacttagatagaaatctaagtagatccatcccactgttatgtaatactgattatctaagtctaaattcttaaatgagctcacaagggtgtctataaattgaagaaaactatgtaaaaacaatacttctaccactaacttagtgataggagcaaaaaagttaacataaagcctgggtatctttctctttaaagtttaataactctaccccagtttcctcactgcaaaacaagaaaagccccaaacatttaaacaatggaaacttactggatattcaaccaaatcaacaggttgtctaaatggttcagaatcttcacactgaaaaattaagttcactagttccttacactgtttcttccagttgctttcaacatagttcgtagctctgatgctttttttcccatcatggacctaaaaatacattcacagtcttaagaaaaatcacactattggtgtaagactgtggtaaaaatgtaactgatctactgtcttctataaaaatacaataatgtcatatatgttgctctcaacacatttttccagaaatgaaatttttaaactatgcatgaaacgtaagttattttcatataacttaaccaatttcagaaatattacaaagttagctatgaaaagcatactctaacaagagcacattatctagtgaaaggctattccatgacctctcacctcccaggtttataatatttgttttcgcagaatatgaagcacatctgataatatgataggcagaataatggccccaccaaagatgtccacatcataatcctcataacctatgactatgttgccttacatgagaaaaggtattttgcattaagggtatagaccttgagatgaaagattatcttgaattgattgcttggacccagtatagccacaaaagttattataagagggaggcagaaaggtcagagtcagagagagactgaaaaatgctacattgttggcttgaaagatggaacaaggtgacctggagccaaggtgaggacacccactagaagctggaaaatgcacataactctccctggagcttctggccacaccaagaccatgattctgacctagagacccatgaaaacttctaatctacagaactatcaggtaatacatttttattatttaagcaactaaatttgtcatttgctgcagcagacatagcaaataaatacaaatactaaacacttgggagtctagaaataaaattaaacgaaaatgactaatcaaattagagtattttaggtataacttttcagtgttctggaaggcaagcacatggtataaattaatatttcataaaaagcttaaatttaaggagcatttggaggaaatttaaaatgatctgggctaaaatgtcttaagcattttcatattaataacctttaattttaattactctatatttgaacttcaaagcctgccgatactccattatgattacccactttcataaacttagttccatagacccttctccttacccctcaacctcatcatcccaacatatctccattgttaaaaaaagttcagtcaccaaatcctagttagttttccctaaaaaggtgtcataattttcctttcctctccattccaagcaaatatccttgactaggtacccgtccttcaccctatattcttggaataaactcctaattcatctcctttaatacacatcttcttatccttcaaattgtattatctattttggctgttcaattgattctctactttaaatgaaatccttggatttcaatatcaccataatctaccccaatcataacagccagacacagccactttgatcacttcaacatccaacctctacaccagtcaggtgtagttcccttaacagtctatggacatgccatgccatatttctctactttttttgtctttcctgtggtagcctctattttttgaatggcctcttcttactccatctcactctgataatacagtacaaattccaactctcccactaaatctttccagtaatttctcccattttgctaataaaatattcagtatctacactgatataacttttcaaagacaaaaactaaaatcctgaattgattttaaaacaaagaaaaagaaactacaaaagtcaaccatgcagagtaacttactctcctccttccagaagatgttttaggaagatcactatcatcctaggaataaaatcagagcaccttaagtatttagagtctcattagaaaataataacataatcttaataaataacatatcaaagacatttggtattaccagagttataacatgttattatcaaaatctccaaagaaagactaccagatgatctttgtggcacccaggcttgaaaaaaaaaaatcattcttaataatcctttttcattccctaagaacatgaactaattctaaaatttgaaattacagctataaaaagacgcttcatgcatttcctaaatagaaaacttgtgttttacctctatccacaaatccccagaaacatacagattcctatagtttctgcattttgtgttctatagtacaggcatgcactaccacccccatctaacttttttatttattgtagagacagggtctcaaactcctggctcaagcaatcttcccatctcagcctgctaaagcactggaattacaggtgtgagccactgtgcccagcctccaaggtactttatataatacacctttcactagctaaaatatagaaagagaatatattccacacctaaagttattcacttagatatattttgatattagctaaaacaaattacctcataaatcatctagaaaattcaaaaatataattttatcaaatgccctatttgttcattggactactacaagagttggtactacaaagccaacattttcttcactttaaaaataccatttgaaattaacaaaaaccattataaaatcaacaaacttcataccaaatcctcagcattttgctcatcattttcagatgtgttagaaagttctgagatatttgtacagtgttgattcctaaaaaacaaattttcactttaatagtatgcagatgtagtgacttgttggcaaggattcaaattatacattaaaatataaacagttcaccaacctatacgtgcctaatttcaaacagaggaatatcaggttttcccccaaccctttgtaaacgtaactagccatcttaaatcctaatttagaatcttgaaggtttttcttgttttccgttaagtatgtatccaaattaagcaggtaatccaaaaataatatatgtatggcctcaattggatgaatacatggatgagtttttctaagtatcatcaatagcagtattcacacaataagtaccaggaaaacagttgatttaaggtaaaaaaaatatatatatatacatatatatataagggaaaaaggaattgaaattaaagcaaatagtatcttactgtacacacaggagaaaaaaagaatgctgaaatatggatatctaagcataaaggagacaaaaatgggtagataattttcctgaagtaagaacaagaaggtgattctggggaggaggtaacttacgtatgagtctccaagacttaggacagaatcaaaccaagaaagctgacaagaatcagttactccccagttttcagctagatgctgaaaacgatggcactgtttctaaattaagaatgctcactagaatagagcagactagaacctgggtctgaatttccaagtcagtttacattctttgattctgaatacttctgaatttaagaaaatctacagaatattcacacgtatacaaacattttcacaggacataatctgaaacattaaaacaacataatcatgggaaaataccaaacaaaatccaattaaatatactctataaaataagtaacataactatactctataaaataagtaacattcataaaaatgatgaggtgataaagacaagaaaaaactgaaggagactaagaaaacaaaacgctaaatttgatggggattctggattagattctgaaacataaaagggtgtaaaaactagtgaaatccaaataaattctacactttctgtcaatagcatggtaccaagattttttttttaacatttcataagtataccgtagttatataaaatgttaacctaaggggagactagatgaaaggcaaatggcaactttctggagtataaaattatttcaaaattttaaaaagttgaaaaactgaattattcagtttctcagacttttacttaaattatgtatgtaaagaaatgtcatctaaagtaaagcattaaaaaagtatagttctgagtaaaaaacaaaactagatgatttttttttcctttttttttttttttctggagacagagttttgctcttgttactcaggctggagtgcaatggcacgatccacacacgattgggctcactgtaaccaccacctcctgggttcaagcaattctcccacctcagccacccgccaccacgcccggctaatttttgtattttttttagtagagccggggtttcaccatgttggtacgctggtctcaaatgcctgaccgcaagtgatctgacggccttcacttcccaaagtgctgggattaacaggcatgagccaccacgcccggcaaaactagatgattgttaatagcacaatatgcagtcacttttacacaacatctatgaaattacttacttgataaattttaaaagttggtcagttatctttttagctgatcttgcaattacactctcaggttcgttaaatgttctggcattatgttctatatatctgacttcccaaactaacgcagacagcctccttcaaaataaagtagacaatttagggcttagaaaatgagaagatagaaaccaagtgaaaaaatgcagcatgtgaattaaacaactgtgaaataataattaaaccataagtgcaaagttataatgaataaccttctaatgctctcaacttgatcatagtcataggcaatacattggacaccgaagcaattatattgaactgaagaggacaaaaatcttaacaaattacttaatcacatacagaaaaccaacaaaactaccctcccttttcatactgcatataggtaccttttaaaattgttgaatctcaataaagaaaatatgttaaatatcatcaaccctaaaagctggcccagcaagctgggattacacctgtaatcccagcactttgggaggacagggcaggaggacagcatgagcccaggggttcaagatcagcctggacaacatggcaaaaccccaaatttaccaaaaattaaaattaaaaaattagccaggcgtactggtgcgcacctgtagccccagctattcaagaggctgaggtgggaggattgcttgagcctggcaggtcgaggctacagtgagctatcatcatgccactgcactccagcctgggtgacagagcaagactctctcaaaaacaaacaaaaaaacaaacaaaaactaagagcttcagtttcactgtaaacaatcaagtggtttctgatgggaatgcacattccagtgttaaattacagagataaattacgtcgataatgtggactcaagatgactttttataatttcttaaagtagttgaattataaaagttaaaatacaatcaactgctgtaaaaatcattaagaataggaaattttatacttaccagtgctctagaagccaaagataaaaagtcagtgcctctgggaaattaatcttccaaaggccaaaaagaccaagtattaactatataaatattatttttaaatgtagttaaatagaaatttaaacatacaaagaaaaaaaataaagttatctaacaacttaacaaaatttctaagaaaaacagattactaaagattgagggttgaggccctgactcggacctcccttctccagccaggcctgaccatccctgcaactctcagcctcctactcatgtcggctgtgagagcctgtgcttaaataagatatcaggccttactggagacactcaaggataggttgaacaactatttttccagagcagaaaggaaactcatgcatcagaaaggccagaagtatatgactgtataaataacagaatctactcagaacagtttaaggaatttcttgggacctacaataaacttagagaaacctgctttttggactgtgttaaagacttcacaacaaaagtaaagcctgaagagaccacctgttcagaccattgcttacagaaatatattttttttaacttttaagttcaagggtacaagtacaggattgttacacagggaaacttgtgccacaggggttggctatacagattatttcatcacccacgtattaagcctagtacccattagttgtttttcttgattctctccttcctgtcaccctccaaaaggccctagtgtgtgttgttcccctctgtgtgtccatgtggtcttatcatttagctcccacaaatatatatatatatatatatatataaatatatatatatatttatatatatatatatatatatatatatatatatttttttttttttttttttttttaattgcttagacagggtctcactccaccacccaggatggagtgtagtggcgtgatctcagctcactgcaacctccacctcccaggttcaagcaattctcctgcctcagcctcccaagtacctgcgattacaggcacgtgccaccgtgcctggctaatttttgtattttcagtagagaaggggtttcaccatgttggccaggctggtctcaaactcctgacctcaggtgatctacccgcctgggcctcatgaaagtgctgggattacaggcataagccaatgcgcctggcctcccacaaaaattatttttaaatgacacaaagaatatccaagagatttcaggaatatcatattcaacagaacgaagccctggtagccaaagcaaaactacttggccaatcacaataggtaactccagatggatggacttttgatgaaagactgccaacagctgctgcactggaaatgaggatttatctgacagttccctgggagcagtagcccccctgttaaaccatctgtcatgagtttggcaaatgaaaaccactggagaaacaaaaccactatttaccaagaataattaaaatagaaggtcttattgttcaaataataaaacacaacatttactgaggccttaagattctgcaccttggttacctgattagaaaaacaaacaactgtttcttcaattatggctattaattttaaaacaaattatgtcttcaatcatgtatgaggatagaaaaattctcattactaaagtaccagtgaaagtttactgaaataagtggaataaaagtaaaatttcagtgatatggaaataatcactgaaaaaaaaacgagggtgaaatatggtagtcaatcttctgcctggccctacccacacctacccataggcatctaacaccatctgacaatgaaagagaataatgaaacagaaaatgctaatcagcccccaattctaccactatctctttctttgtttaccctagtcaatattgccaaatatagctttttaaacattttgaaagcaggtttctactaacctgtaaaatcgattaacaagtctcattcgaattgtgtaaagatcggttggataagctactacagtacagtacttcgggtatgtacacaaatcaacagggcctgcaaaagctgctgctatatctgttagggaagacaggagagtttttaatcaataaatccattgcctctaagtggtacttctctagaaatcattcataagatatggctacatttaacattacaggctaaattaaaagataaccaatacaaagtgtagaaaagaacagaaacctcaattatgctagtatttttaaatacctttatgaaaaaaattgaaaaaaaaacttttcatcctaaaaaataaaaaacttaccaagattcaaaagttgatctataccactgataattctatcacattcttcatctcttgatttctgaccccattcaccagcttgtggtttatagagcaatttctctagctcatctgttgtgacagaaatactagctcctaattcttcaggtggatcaactatgaataccataaaaaacaatgagaggaagaaaaaaacacaaaaaataaatatatacggtattaaaattcaattttcatagcttataaaactaggttatctccacagtcaaaaatagagttcaaatgtgcaactcttttaaaattactcattgagattaacaaattgcttaaattcaggtaaaaacacaatctacctaccctaacaaattaaaaattaaaaataagagtgccagtattgcagttttcagtctatttcttcaaggaggcaaacttaaccctgaggcctctgaaaacacaaattgaacctgacaatattcaaaattttaagcttacatacagttaaaatttttaaattaaaatttttaaaaagtcaagtcaaaatggataaataatcccacatgacaaatggctaattttcttaaattttaagggagcgcaaatgaaacagactggtatttcttgaaaaaataaggagaagcaggcagggtggctgacgcctgtaatcctagcactttcagaggccgaggtgggtggatcgcctgaggtcaggagtttgagaccagcctggccaacgtggcaaaaccccatctctactaaaaatacaaaacttagccagctgtggtggggcacacctgtaatcccagctactaaggagactgaggcaggagaatagcttgaacccggaggtggaggttgcagtgagccgagattgtgccattgcactccagcctgggcaacagggcaagactctgtctcaaaaaaaaaaaaaggagaaaatctgaggaagctcaaaatattttagcttattgaatagtagttctaacatacagataagaaatgtcatttactgtgtactgtgtactggctaccaggttaactcagagcacgtttacaatgagggaacaagggcattgggaagagcatcattttaacagctgctaaatgatggagagaatgctcatgggagcatttcctctagaaacatatccattaagattcctgcaaacatacacacaagttttatatagagcattctttgggaatgctcttaacttcagtagagttgacctattagaattaagtcatatgatgtagtcttttagctgagagatgggaattttttaaacatggatgataaatgattcctataagcttataattcatgttcttgcaaaaagaaaaaggatttccattttattttctgcatgaacataaaagaaatgtgggggaagagggcagagacatcccactgccctaataagccaaaatgtgtatttttatactgtaattcagagttatgctttcagtattttatctcatcaaaaggaagaggaaagacgctgtacaggcaggcaacataaagtgctttaaaaaacactggtttatcaaagccgggatctaagttcaaatcacatctataccacctaaaaactatgactttgggcaaggggtgtgggtgggtgggtgtgtgggtgtgtctgttttaatggggagaaagggggtctcactatgttgcctgggctggtctcctcaggtattctggtgaatactgatcaacccacacgtgtgaagaaatgacaggaagccaggaaaagaaccaaatgaaagttctgtgataacaaaggcctgatgcacaaaaaggccagcacccacgcctgttccctcagccagactgaaaaagctgcatgatacatagagcagtggatacactgcataaaagggccttgccttagaagtcaaaagtaaatcagttctaggctgagcactgctccaaacccatctaccatatcttaaaaagataaaattgtttccgactagcttaattgtgtgacagaacaaagtgtaacacttacaggaatacaaaaatatacagcacccaacaaggtaaaaattcacaatgtctgacataaaatgtaaaattataacacaggtaatatattaggaaatacccataatgaagagatttattaatcaaccaaccagaattggcacatatgttagaattagcaaagacatgaatgcagttattatattacgcatgttcattaaaaacatatataaatggaagacatgaaacacacacccaaatccaacttttagagatgaaaacaacaagcagtaaggtgaatactataaacacattggctggtgatacataagatattccgaaagaaaatataaatatataagataaaaatataaaaagactcaacaccaggaatggtggctcatgcctgtaatcctagcactttgggatgccgaggcagggggatcacttgaggtcaggaattcaagaccagcctggccatggcaaaagcctatctctactaaaaatacaaaaactagccaggcatggtggcacacacctgtagtcccagctactaaacaggctgaggcaagagaatcacttgaacctgggaggtggaggttgcaatgagtggagattgcgccactgcactccagcctgggcaacaaagcaaaactacatcttaaaaaaaaaaaaaaaaaaaaaaattcaaaagagcacaatatgtgttattcatttctgaatgtatatcatcattgaggggaaaaaactaaatcttttctcataatgtctatttagtgcctaacttgatgccccccaaacggtaggcattcaagaaatgtgtatgaaacaaatatgtgatgtagttatatgatttactctataagcatagctaatatttcataaaacaaagcaataataactaatattttccaaacataaaactaaaaagatgcatatgtaacaaattttacactaacatagtgtagacacagcaataaaaactgaagacacagcaataaaaattatcctaatgaaacagtaaaagaaaataaagcaaaaaaacaaaaaaaatccagaaaagccccgaaatacagagaccatttaagggaacagaagaaattatgatatcccaaactaatggataacagttaaaaatgaggaaagaatctgaatatttctcagccaggctccgtggctcacgcctgtaatcccaccactttgggaggccaacgcaggcatatcacttgaggccaggagttcaagtctagtatggccaacatggcaaaatagctgggtggcacatgcctatagttccagctactcagcaggctgaggcacaagaaccacttgaccctggcaggtggaggttgcagtgagtcgcgattgcaccactgcacttcaacctgggcaaagagggagactgtctcaaaaaaaaaaagaaagaaagaaaaaagaaattgaacatttctacaaagatataaaaatgaccaataaacaaaggaaaaaatgttcagtatcattaggcatcagagaaaggcaaatcgaaatcacaataatacttcctataagttaaaaaaaacaaaagtatccaggatgtgaaaaaattggaacccacatacactgttgctggaaatgtaaaatggtatacctgctccaaaaaaaccatttgtcagccctcaaaaggttaaacagagttaccacgtaacccagcaatgccactcctacatatgtacccaaaagaaaaaaaaacttgcacatgatattcacaggaggactattcaccgccaaataatggaagcaatccaaatgcccatcaactgatgaatggataaaaatgtgttatatccatacaatggaatatgattcatcaataacaagaaatatcttggtttctaaatgccattctccaatcaaacaggccatggcccctgaaaaactgcctgattccacagctgaggtaaggaaagtacaaggtgagccttgaacactgcatattgccagaagctatgaaaacactcaaaggcgattcaaaagaaaatgtcaaatggacataggagccaacatgaaggggttcccagtggccaaatctgcaataaggtagcaacaaaataatgacaacaattgaacactgattttatttcacaaaaatctgagtacatactaatataaataaatgggaaaggagaagatgtatcttatagtagaattccaactaacacatgtaagacaatgaaaacaaaaaatcattatttgaggcaagaattatcaacggatgctacaattagtgagtggaaacagcataagaaacaagatttttgcagcacataaatatatccccatgggacactaattataatggaaaaagtatttactttacactggagaaacctgacacataccccctaaatcaaattattaaaatcctaaaataattgcactgagaaagacacattacctttctgacatttttgccaaaaatgcaaaacctaaatttaatccagaaaaacatcaaacccaaactaatggaaattctataaaataactgcccagtaatcttcaaaagccttaaagtcatgaaagacagtgaaaaacggagggatcctggattaaagactaagatgacatgacaaatccaaaatgtgaaaggatattagtgaaacagacaaaatctgaataaagtctatagacaatagtatcgtattaataatttcctgattttgatcactgcaatgtgctagctgtataagaagggaaatataggtattcagaaaatccttgtactattttttttaactttttttaagtctgaaattatcttgaaatcaagttttttaaagtgctataaaaaatggagagtacatattgaagagaaatatcaaaatgcagatattcagagattttcttgaaaattataaaaagagaaaaacatcaaaggatgttacaaatcagtaaaaacacataaagaaagcttggtggtgaaaacaatggacacaagagatatagagtaccctttcaaaaagtttcgcaaaagggaaataattcagtaacaaaaatgcttcatgaagtcaaatgtaaggtctaagagacatattcaaacctgactggagaaaggtaggaggaaattaaaattgttggaggggatgagctaagtgtaggtaccaggcccttggaaggccaacagcagtgggatgctagcactggaggacaggctggctttaaatagttgtctatttcagtagaaaatccataataagacaacttgaggtaaagcagaagacagatggaagtcaagttcaatcttttccttgaaggaagaccaagggtaaaagattaagaatgaggtaggaaaagtagaggctacatgaaggatgtaaattttttgttttgtttttctgagatggagtctcgctgtcgcctaggctggagtgcagtagccgcaatcttggctcagtgaaacctctgcctcccgggttcaaacaattctcctgcctcagcctcccaagtagctgggattacaggcacacgccaccatgcccgcctaattttttgtatttttagtagacacagggtttcaccatgttggccaggctggtctcgaactcctgatctcaggtgatccatctgctttggcctcccaaagtgctgagattacaggcgtgagccatggcgcccagccaggagttaagtttaatgcagggttacatgagaaacgacagcaagctattaaggtacagccaaaatcaagctggaatctaaggtcaagaattaacaaaacagataaacacgatgctgttgtcttctttcagtaaagttcagttactgtaataatttgaatatattgatcatagaatacaaatatgtttgttccatgtgcactggcaaatgtacatattataaaaataaaatgttttcattatttaacaaatatatataccattatcaggaattggttccatgtcccatgggctaagtttttcaatttcagtattatcccacctgttaaaaaacaacaaatctctggttagcctttcataaaaacaaaatgtggataataggtatccattataaaaatacaaaatgtgaaaattaacctcactgcagcagtacaattttaaatattaacagtaaatttttttaagaaggatatattattaaaataacaggtttaagaacaaaaccagaaatcctatgtggcctgcacccaaagtgaacaataactgaaagacaaggcatgaagcccttgaattccactacagccacagtcaatggtttttatcccattgccaatgaagaggcgtcaaaggtttctttgaagaagattaatgatatagtatctgcttctgaactaggacactgacaatacgaggtaaaggaaatattaggtggctacagaaatagttccaggaaagcaagcagaacctgaaccaaggggagtactggtgaataggaaacaaagagtaggtgcatgtctgagagacatttcgggtcagcctgacatgacttaatgacagataaaaaccatgtttttttaaaaaccagaaatgtattatttatacagcaacctgccacactgaattactgggaaatgattagttttcatctgtatacaaacctaacaatataacactggaaatgactatcaggatactgtggttgatatggctcttgacttaacactgttccaaaccaccaagcatcatcaataatagagcggaatctgtcacctaggagagaaatgatcaagtctgaggcatttctctgctaacattcattaacatttttttaatctacaaaataccatatgatacagataaaaaagccaaaagcacaatacaaaaacaggcaagcagcgctcctaaacaaaccaagaaaaatatggcataaaaaatttaacttttagattaaatgcatttctagatgtattttacaactctaacacttcaaccagtgaaataaactgcactagatctgtgtttaacattcattacaatagaaacatgaactgctgcagtaaccatatctcttccttcttacccttcccaccatttacaaaacaaaaccaatgaaacaataaaagtcacctatccagcactgatgattcttcgggatatagatcaacagttcttttctcaaggaaagttttatagaaataatcaaaattaaagctacaatttatccccaagaaagaatataatatacctggcaaacagtcttgaataattaaagtatgcttacagtgaattcttcaaaggtttgaaaaaaaataatgccataactactagacctacatgttttagtctttagcatattttcaaacttatgtaaacatgagttttacatatattttacttcaaaatcacttgaaaccatagcccctgaaagaaatctaaggagactagtatagctttaaacttacaatttaagacaaaccacaccatgattttatccaaatctctaataccctaatttaacataaacattaattacaactgaatgtaataataataaattattgtcataaaatcagctgcctcaattttgagaggccaaacataaaaacatgttagaagagagtctttgatataaaaaattaagtgtatatttttcttgctatttacctaatactagaagataatttcagtttagataaaaatatttcttcatacaaaaacaaccctttaaataaaaaggagcctgaaaaaattaagttttctcataataaaagtgtcttttctatgtttttgctagctgatcaccctggtaatcttatgttaaggcttttcaaataaacctactttggcctttcaagagaaggataaaaatccactgtaaaaatgaaaacaagcaacttcttcttgccatactactcaaattccacgcaaaaatggggaagcaaaatgaattaaagtgtagtataacaggtctggtccaataatttctcaaccacaaaaataaaacaaaaaccactaaattacaggaggcatctgggactccatctctagagtttaactgtagataattcagttttaaaaaaattaatggacatgttggcaaaaatgagagcctcttacacctcatgggagctgaaaaatcataatagctgggaagctttaaagttatttggaacacaactatacaacctgctaatgttgcttcatgttatttttgtggctgtatgtttttcttcaagaaaaattttctctgcatctactcccaaaataatcttgattacttgtgtagatgttaccaggagaataatctataaagaggagccacacgccctgacaatctttcacgtcagatgaggatgattagggactttatctaaaatttaccttcttgtagtaccacacaaaaaggcagcagtggccagatatggtggctcacacctgtaattcctacactttaggcaggctgaggcaagaggattgcttgagcccaggaattcaaaaccagcctgggcaatacagcaagaccctgtctccacaaaaaaaattaaaaattagctgcacatggtgcagcttccagaatttacatgtttgtatgcactataattaagagtcccacagccaaaaaggaggctgaggtgggaggatcgcttgagcccaggaagttgaggctgcagtgagctctgattgcaccactgcccttcagcccgggcaacagagcaagaccttgtgtccaaaaaaagaaggaaagaaagaaagaaactgcagtaactagaaagatcaatgtcttaacatcatttatgaatgtgtacaccagatgacacagcctgggtaaaacttagtatttctaacaaaaatccaagaactgataaaagaacgaaccatcctacttctaactcaatacacaagctccctggatagcattacacactgaacatatatttgtacacctgtgaaaacaggtactacagttactattaacagttgctattactacccagcctaatgacagtcattcaatcatcaattatatcctgagattaataatctacacaactctgaataagtgagccctccttaaatgatcatcacaaaaatcacattcgagtaatttagtacctacattgaggtactaaaattactccaatgtgtaattttactcgaatgtgtaaaattacattgaggtaattttaattttttaatttttctgcccacctatacattacatggttataaagcaaagtgtatatgaattttttatttcttaacaaaacagtgtcaagtcttcccatttaagtctacgttgttatgatatcaagggtaaaataattgggtataccagaacattttcagtgtgaaatctgaaattactcttcaaccttctgatcattttagatcctagtataattgtgtaaattatgccaatgttacatcaaagataattatatacaatatagtacagggaagtctaaaaggaagtaagtctaccctagcctatagtcaaggagtgaaaataatcttttccaaacgtcatgaaccaaaagaacagaagaaaagttgctcgtctaaaaaagtctacataatagggctgggcacggtggctcacacctctaatcccagcagtttgggaggcagaggtgagtggatcatgaggtcaggagttcgagtccagcctgaccaacatggtgaaactctgtctctactaaaaatacaaaaattagccgggcgtagtggcgcacacctgtaatcctagctactcaggaggctgaggcaagagaatcgcttgaactttggaggcagaggttgcagtgagctgagatcacaccattgcactccagcctgggtgacctagggagaaaatgcgtgccatgcccaccgtcccccggcccctaccaagaaagtctgcataatcagtaagtaccaagccgtaagcaaaatatatttataggtcacttatatctcttctggaatttacatgtttgtatatactataattaagagtcccacagccaaaaaggtagaccaataaaacagattaatttttaagggtatataaaacttagtaaggatagacttacaagactgccaattcctctgtcttgcttcatcataaaattgacgcaatacaagaaagtcaataacatctggcatatcatgatatctagacaaaaatttaaaaaattgttaaactctctacatagcaggttatatagtctaaaagcagcactgtccaaaagaaacatgagatctacgaatgtaatttttaattttcaaccagctatattttaaaaggtaaaacagtaaacttcatagcatattttaaatatatccaaaatattatttcaatatgttatcaaaacaaaatagagatctgacatattttttcttcataactactcttcaaaatgcagtgtgtacattcacaacacattcatttctttaaaaaaaaatgtttatgcctcatactctgccaagtcacatattaagacattcaatcaaaccatccatatttcaagtgagcagtagccacatgtgactagtggtaaccttattagacagcacaggtgtaggaaattatttattctgaattttttcaaaaacaaagggcagaaaaaatttggcccgtatgtcagaattccccacccacataagcagcatgaaaaccatataaaacagactgcccacacttaactataactgtgacatgcctactatgacttcagggtcagggatgggtttcctagccatcagaagctcgagccacatcttaggctatccacagtgctctaccagttaccctggagttaaatgggaagggcatgctaatcattcaatcagcaaaatggcaaatttaaatttaagtaattccattttaaaaaataatacatacctaatagagaaagatttgtccataagttttccagttgctggatctataaatgctagttttaggcaacagagtgtagggggcccaacttcatatcgtattccaactattttaaccaattcttgatcctttaacagacatattttttaatggttaaaataaaagcaattccttaatactataattctccacatactgttatattaagtaaactcataatttaggcttccaaacccgcagacaagtttaattaataccattaattacattcaattttgctaaagttaatctccacatatttaatacagtttctaatacaaagaacatcctttagaaaatacattacaaaagtgtaagattgaaaacacaaatctcggattagcgcaatatctaacgacaatcactgttaaaaatctaacatatttccttctggctttgttttggaaacaggatctcaccatgttgcctaggctggagggcagtagcacaatcatggctcactgcaatctcaaactcctgagctcaatcaatcctcccacatcagcttcccgagtacctgggactgactacaggtacaacatgccaccacaccaagctaattttttattatttgtagagacaggtctccctatgttgtccagactagtctcgaactcctgggctcaagtgatgctcccacaacagcttcccaaagtgctgggattataggtgtggcctgccacacccagtcaatgcacatttttatttatatagctttatattatacagtgaaaatgtgtaagcattctacttattcataagtgttcttcaaaatcttgatattaagtttctgcctaatacattcagtaagtaatatttgttgagaatctaccatatgctatgacctcttctaggcagtagggacaggacggtaaacaagtgaaagtccctacctggatggagtatccatcaaatggatttgccatagtcaaccttccccccagtgtctgcttctctgatactaggaatacaacagatcattcatccacttattcactgaacaaatgttattattataatgtaccaaacaaagtgctaagcatagttttcattattcacagcagttatgttctatagtcacctagaacactgaaataaaatactaaatcagtgctatagagaatatatagggataggttcctgcaaaattctggtcacaacactgtagtaaaccagtgcatacgtaacttggttttatgcgtgtttccgtttaaaggtaccttatttaatatgttgttgatttgcaaacatttaactgatacctgaatgaagcttatctaacataccttctccataaggcacatctcagccttctagcacttaagaacactagagagcatgtcagcactacgcttaggggccattttaaacagcaaagtcaccagaaaaagcacaaaaatggaaaacatgtggcactgaatagaccatgaaaaggacacttgtttgcagtgcgagagcttaaaaaaaaaaaaaggcagagcaacaccttgttcaacctcaactagaaacatgctcgtcaggcaagtcaaatttttcaccaccctgagcatgtccagaaatgaccaaaaggctctgagagtactgtttgggggattacaaataaagcaagtacgcagttcacaaatacagaatccaagaataatgaggatggactgtacttaggtacacagtcctaagttaaacagacataaataaaaccgccaatgtatataaagcctaacttatacaagcagagccattaagttgaatataagtgttaaaaacagctatatttgttaaaataactagcattttcttcattttctaagtttttaaaagtatcaaaatctgtagaataaaaatataaaaaataaaaaaacacgtgtactactaccccacagatcatcaccattgacattttgatgttgttcttttgattggctgcaaatgttttcaaaattttgctaccataaccagaaataccacttcacaccccatttttcctattagtaatacactgtgaaaatgtatccatcattcattcaacaaatatttttcaaccttcaagtacaagatgggctgtacatagtaagtgactgtgtgaatgcaccatgatttggttcattcactattgtggaatatctgaattttttttttccagctttgtttctgtcaacagtgagtgaactacaatactcatatatttacaagcatttctgcttgttttccaaattaccagaagagtaaaatcacagaattaaaagttccaaatatttttcagtttcaactactattaacaaaatatcccctagaaagcctggaccacttcacacaccccaccagcaatctgaataactgttaacaaaccaacatctttgccacttgctaaaatgtggaattctttcttgagctaaaaacaaacgaaatcacaaaattggctaagtattgaaaaggaaaaattattatttccttattttattatccatgaggttaaacccttcttccagtttttatttcttcttttgaaaacttgcatttcttcctctgaaaatctgtcttggatacataaacatttttaagagtgataatatatatattgccaagctgcctttctgaaactctaggttgttgcatttaacattttacacaccaatcagcaacatacaaattttgcccactgacaaacaagccattcccacaggatcttaaggtttggttacagcagaaatgttatcaagtaggaaagaaagtaataaaatatgtttccaacaggtttttaaatagatttgtaagtaatttaactatgtatgtgctaaaatgtttaatgatttaataatgccatcatcctaccctaagatccatttttctccatggctccttattagggttcagttcataaatattatttcttcttacagcctcaatataagcttcatgaccctgtcgaaaatatattacctacaaaagggaaatatgcatttaaaaattaagagcaatataaactttatgttccatattcgtgtttttaaatttgtattactctcacctcatcacccatttgaggaacaaaaggagattttctaagtgtggtgtcagtaatccaaactggagggtgaaattcatataaatgctccatatttgcaagctctgctggagtcatcctccgcaaattctaccaaggggaagagaacaaagtttcttagattagaaaggggcagcatgcactgtctgaatgaaaaataaaagaaactttcaccattcagaatgactatttttgccatgtccatctaatgattagttttcacacagcatatatatttagttcctttacacaggaatatatcacttaaaaaagcattgtaaatctacctaacattttcctagcatcatctcctaaatttctgatagattcttcatgctattttacatcccattttagggggctaatacccagcctaaatcctcttttacccatagcctgttctgccaagactccactctgagtttggccacaggctaatcatcacaaggagtctcctcttgattttaggttgtaagaccggtgatttcaaaatatgcctacaaattccccaatagttctctccttttcaagaagtggaagtctcctcctcttaagtgtggactacacttaatgactcacttctaccaaatataataaagccgatgagactatgtgcaacttctaagactaggtcataaatgggggcttatccctggctactgttaaatcattcactctgaggaaaatcataactcaagcagccagcttgagttgaaaatcaacactcaagcagccagctaaggagagacctgtgtggcaaggaactgaggccaaaagccatatgaataagctcggaaagaatatcatccaaccctcatcaagtcctcagatgactgcagccccagtcaacatgttgtaacctcatgagccaaaatcacccagtcaaatcagctcccagttcctgatcaaccaatacatgaaatatgcaacgtttgccatgtaaacacctaaattttagggtggtttgttatatacagcaatagataaatacaaagacttaacatctttaaacaatgactacctgcttgaaatcagcacagtgtacacaaataaatagggatgttattaaatgaagagacaagtatgaagacagacatgtaaaatgaaaatggtaaacgtagcaataacacacacacacaaaaaaaaagcaccttaaaattccttgaagtctactactagtgttgaaattgacaggagaaaataagtgttgccgtgagattctgagcaaaatagagctttctctttaagtttcagatttggaaaggtttaactgtcaagcccactactcagaacagtggagatggagaagtgttaataataaagtagcttggccgggcgccatggctcacgcctgtaatcccagcactctgggaggctgaggcaggtggatcacttgaggtcagaagttcgagaccaccctggtcaacatggtgaaaccccgtctctatgaaaaatacaaaaactaaccgagcgtggtggtgtgtgcctgtagtcccagctacttgggaggctgaggcagaagaactgcttgaacacgggaggtggaggttgcagtgagccgagattgccccactgcgctccagcctgggtgacagagtaagactctgtctctaaataaataaataaataaaaataatttttaaaaagtttatgtgtgacttcatgaagtgtatcaaagtcaatcataaaacaatataacaatcatttaaaccaacaatcaaaagcctctaactggaatgtatctttttcattatttggttatgatatattaataccagatcctggggaagcaacaatgagagatgcagaagcattcctggccctgaagaagcttacagtctactgggtaatacagacgctgaatgaacaattacaagtacaatacagaaggagcttatgtttgggaagctaacctcttaatggagggatgggatttagaatcttttttactgttatcctatatattattaagaaggcatggaaagcttaagaaacaattacattaaagcaacatttgagacaaggtaaagctgagggggaaaaccacagcttttgctttgataaagataacctatattcgagtccaagacttaaggtactctcaaaaagtaactaaaactttatttttacttaaccctttgtttagatacttaaacctgaaattaagccaaaaagcataatatgagaccccagaaaactcacaccccactcaaccaacccagagtttttacaatttaaatggggcaaaagatttcaatagcaccaacagctcagggaacatgttaaacctcttgtcttatatccagaaaatcagaaaactgggctaaacacgatgtatttcagaaggtgtttaaaattatttgcatgatttaacctcgccaaaacaagcttgctagtttaaagacacctttataccaatgcttcacatcatcagtgaaaactgtttatcaagagggagcagtatggagtacagaaacagcatgaaccaaaatctcacacttaatcttttaacattaatggaatttcagagtaagtaaatatgactaaaaattacagcaatggccaggcacagtgggtcacctgtaatcccagcactttgggaggctaaggtgggcagatcacctgaggtcagaagttcgagaccagcctggccaacatgacaaaaccatgtctctactaaaaatacgaaacttagccaggcgtggttgcgtgggcctgtagtcccagctacttgggaagctgaggcaggataatcacttgaacccaggaggcagaggctgcagtgagccaagattgcaccactgcactccaggctaggcaacagagactcctctcaaaaaataaaaaataaataaataaataaatcacagcgatggcataaagcactgctttgttttaaaactgcatgtgtgttttgtctccaagaccttaatcaacaccctcaatgacagcattcttataaatgatagccaactgtaggtccttgctgtggcttctcttctgtgtaagtatgtacgtctttctcagtatcatagtgaaccctacagtaaactgcctctccagcattgctcaaaagttactccgttcatagtgaattaagcaaggtaaaagaatcatggagtgattgctacagagatggtccagtgtttggagaagatctgtgaatgtttcttctaaatatatgatatcggctccaagtatcaggtcaaaatctctaggagaaaaactccccaaattctttccccaagtcggctccttaacaaaagctctgggttggatacaaggaggtaaattgccttgaacatttgatttacaaaactctaatgctacttttcgatctatgacagtcacatgagcacccagcagggcagccactatgcccatcagccctatgccagcacccagtttcactgcggggcagcccaagagctccacagctcccatctccagatgtgtggagagaaccatggccacatcccaaaccactgtggcaattcccagttgtctccggtcctgccagatctgtgtcatgtggttcacaaaggtggcaagaggcttatggaatttctgcaaccccaatcccacggtctcctcatagggcaacagggccaatctgcctgcacccagccctctgaccagacctgcacttagactggatgttaacggtttgagattatcctgccttttgacacagccagaaacatgcagtcatggcagttccatctcctcaagactgaagtgaacgacactggtggacttcaagtctctcgcggggagaccagggccccagtcctgcaaaggactccgcatctgtgaagcaaaggcctcccccataagtcccactatatctgcccccacccatccctccaaaggactgacagatgctcccttccttcccacaggccccagagctcctgctatccacaggggttgaaagtaggagacagaggagtccacagtgcccttcagaatccccaagacacacagggtacctgctgcaccctgggagtgcagtgagcttccccaaggagggctgacagctcgcccagaccagccccagagcagggcccaagacacccaaggcaccactatgccagtatcacgagaaatgttaaaacaacatttgaaatggggtaaagctggggtatcatgatacatgctatttttaaagatacgtttttcttacctccttcttaggcttattttctttctttctctttcgtcttctttttggaggagataaattctcagtagatatttcatcttctgaactactacaaaatcgagtaattcgtcgacgacatgatgttcttaaaggaggctgcaaattgatgcccgcatcagctgtccaatcggaatatctagatgaagagtcactagaaaaggggagtgctttcagttgaatggagccagaatataagcactgatagcaagtcaatcatataaaattgagggaacagagagaggagaaaaagggaagggaagataccagaaagacttaacttgagcattctcccctcactaccagcaagtactgaagtgactaaagatcatgacaaacataagagaaaaagagaaatcttcactaacactagaaattaggaaaggatgtaaacccgaaaaaaaaaatttaggtatattgtagataaaatatgatggaagacaactagcaattaccccttcaaggaaacaaaacacagacttatagaaacataagaatcatacaaaaccccaaaaataggccccaccactacccccatgttggaggaagctgaggtatagaccaggaatttcaactggaatcacaagccatcaatgaacacactgagaagcccaagggaagcatagctacaccaaactgaaagccttaagtagtcagtttcttgccaagaggagtctccctgatagaaagagactagtcctagtccttagcaaaatcagagtcaaagaggaaactagttatagaaaactagtccctggtccactactagcttcaccaaacagaaataataataaaaataaaggactctacttgggccatccttggcccaacttcaaccaaccacacaccttttcgtctctatcaaatacacaggtaaacacattacaaaaaggtatttattagaaaaagagcttatttatgaaaattataaaagcatctgttttagataaataaaattcaagaaaagttgaattagaagacaatgaatgaaaacacggaaggtagaatagtggttgccagggacatgaggaagggtaaagaaaagaatcattctttaattggtatagaatttccgttttgcaagataaacaaggttctggagactggctgcacaactatgtcaatgtacgtaacagtactgaactgcatgctttaaatggttatatttctgttatgtgtattttaccacaattaaatttgtttaaaaaaagataatacattatgttcttaaaaaaatcattctagctccttatcataatgaagtaaaacaagacaagaaaggaagcagagagtatgtgataatggtttgaaccaaacagtaccaattaaaaaaaaaagaaagatgatctgagtgataggaaggagaattttctagccatgttacggataggtggacaagagagattaaggtccagttttctggattgaggatctgttgagatgaaggtgacgtgcaccaagaaccagaggctgacattttggacccaggaaatctggatctcaaaactaacaaaaattcaacacatgcaataataatgaatatactgtggttttaccacacatactttagatactagtctttttaagtgcaaccaagattaaatttatattttcagtatgcatgttcaacagtgctgggtcaactgcttaaagtcaaaaaaaaaaaaaaaaaaactcctgaaatactcctataggaacagctgttggatctagtttttgtctccttttaagtgtattaaaaactgttccacagttgcaaattcttgcctcttgaataaaattcaagtatgattccatccaagactatgactaaaatgcttaaaagaccacaacaataaaaacagataccttgaactttcgctgtaactctcactttttctgtcacttctccattcatcctcttctgaagaaccagaaccttcactctgatcacaggaagtctcctaatttgtgaaggggggaaaaaaatcttgatccctgaagttaaacaacacatgtccagaaaaaagctgtacacaatcctccccagtaagattaaatcatctaagaaaaatgaacagtaatcagtaaatatataatcagataaacttaaaaagcaaacttcttcactacatccctttcttatcaaagcataagacaaaaagagaacatccgtaagatttaacactaccaccattagcaaagaaagtgatacaacaggccattctgagtaaagttaataaaaagtcaatgtaaatgttttccattttggactttagctattctaatagatgtatctaattgttgttctagttttcaattccctgtgacatattttggtagcttttcatatggttatttgtcatctgtttatcttctttggtgaggtgtctgttagatcttctgcccatttttaaattaggctgccttcttattgcttggttttaagagttctttgtatattgtgaatataagtcatttatcagatataagttttactaatattttatcctggtttgtggcttatcttttcattcttttaatagtgtctttcccaaagcagttttcatttcagtgtagtccaaattttttatattttttctttcatgattgtgcttttgatattgtatctaaaaaggtcaatgccacactcatggacacatagattttgccctttgttatcttctagaagttttatggtttttttgttttacatttacattaagcttatgattcattttgagttaatttttgtgaaagactggtgtctaggatttattttgtatgtgaatgtccagttattctaccactggctgaaaatgataaatttgtccaccaagttctctttgctcctttgccaaagatcgtttgaatatatttgtgtcagtctgtttctgggctctttatgttgttccattgatctgttctttcaccagcatcactgtcttgaaaactgcagatttacagtaagtcttaatgccaagtagagtgtcagtctttcagttttattcttcttcagtgttgtgctggctatactggatcttcttcctctctatataaactcgaaaaatcagtttgtcagtaaaattaatttgctgggattttgtttgggattgtgaatctacagatgatgctggaaagaattttttaacaagggtgtggatcagcaggaactctcattcattactgataggaatgcaaaatggtacagctactttggaagacagtttagcagtttcttataaaactaaacataataagatccagcaatcacacttgatgtttacccaaatgaggtgaaaaattatgtccgcacaaaaacctacacccagatgtttataccaactttataatggccaaatcttggaagcaaccaacacatccttcagtaggtaaactgataaaactatggtatatccagacaatgaaatattattctgtgctaaaaaaaacaaacaaacaaacaaaaaaatcaagccatgagaaggcatgtaggaaatgtaaatgcatattaataaatgaacgaagccaatctgcaaaggctactagctatatgattccaattacatggcattctacaaagataaaactatgaagacaaaaaatcagtgattgtcaggggctgttgggaagagaaagatgaacagatggagcacagaggatttttagggcagtaaaatcattctgtgtgatattataatggtggatacatgtcattataaatttgttaaaaaattaactgggcatggtagcacatgcctgtagtcctagctactcaagagtcagaagctgggaaatcacttgagcctaggagttcgaggttgcagtgagctatgattgcaccactgcactccagcctgggccatagggcaagaccctgtccctaagaaaaagaaaaaatcaaataaatatatccccaaatgacacttctagcagtacaaaaatacgtatacaaaatattattcactgtagcattatttataatgtaaacattggaaacaacctaactgcccataaccaggagaacgattcaataaactgtttcaatcatgccataaagtactacataactcttaaaacaaataaggatcatatggagtgatctcaaagatattttaagtgaaaaatgtcaagtgtgggactatctgtagtatgctgtattttgtataagaaggataaataacttttgaaatatttgtactaaatacaatttggttaacgacaaaaaaagaacagtaagtaaataactaaactctacatactagggtttttaccacagggtaagtaaatctttttttttttgttttttgagacagagtttcactctgtcacccaggctggagggcagtggcactgtctcggctcactgcaacctccacttcgtgggttcaaacgattctcctgtctcagcctcccaagtagctgggattacaggcacccgccaccacgcccagctaatttttttttttttttgtattttttgtagagacagccttcagccacccagcctagtaaatcttaaactactttctgtgtatgtagaattaaacaaataagtttatgataaataacagggctgggcatggtggctcacgcctgtaatcccagcattttgggagaccaagtcgggcagatcacttgaggtcaggagttcaagaccagcatggccaacatggtgaaaccctgtctctaccaaaaacataaaaaaattagccgggtgtggtgatgcatgcctgtaatccctgctacttgggaggctgaggcaggagaatcgcttgaacccaggaggtgaaggtagcagtgagccaagactgtgccactgcactccagcctgggcaacagagcaagattccatctccaaagtaaaaaaaaaaaaaaaaaaaaaaaaaaaaaaaaaaaaaaaaaagatttaaaaatctaaataaataacaggagccaggtttctctgtacagaagggaagtacaaacgggtatcattaaaatcagaataatgtgaagtcgtgcataacaatgacagatatacagacaaaaaaatacatgtgtctgcatataatatgtatacacaggcatactttttatcgtgctttactttattgtgcttcacagttgtgttttttacaaattgaagttttgtgacaaccctgaacccagtaaatttattggtgccatttttaaacagcatgagctcattcttgtctctatgtcacattttagtaattaccatatttcaaactttttcatttttattgtatctgttactgtgatttgtgattaatgatctttgatgttactattctaattgttttgggggcactaggaacaatactcatataagatagcacacttaatgaataccatgtgtgttctgactgctccagtctattccctgagatacaatattgcaattagacctactaataaccatacaatagcttctaagtattcaaaaatgaaagagtcacacatatcttactttaactcgcaatgtagaaatgattaagcttagtaaggaaagcatggtgaaagccaacacaggctaaaagctaggcctcttgcaccaagtagccaagttgtgaatgcaaaggaaaagttcttccaagaaatataaaatgctattccagtgaacacacaaatggtaagaaagcaaaatagccatacggctaatatagagaaagttttggtgtctggatagagggtcaaaccagcaataacattcccttaagccaaagcttaacccagagcaaggccctaactctctttaattctatgaaggctgagaggtgacaaagctgcagaagaaaagatggaaacttgcagaggttggttcatgaggtttagggaaagaaggcatgtccataacataaaagtgtaaggtgaagcagcaagtgctttaatggagaacctgcagcaagtgatccagaagatctagctaagataatcaaggaaagtggctacaataacagattttaaatgcagatgaaataaatagccttctattggaagaggatgacatctaagactttcacagctagagggacttatggcttcaaagcttctaggacaggctcactctcttgttagggctaatgcagctggtaactttcaactgaagccactgttcatttttaccttttcaaaaatctcaggccccttaagaattatgttaaatctgctctgcctgagcataagaaatggaacaacaaagcctaggtgacagcacatctatttacagcatcatttacagcatggtttaccagatattgtaagcccactgttcagacctactgagcagaaaaagaagactcctttccaaatattactgcttgtggacaatagacctagccatccaagacctctgatgggcacatcaaaggagattaatgttgttttcatgcctgctaacaccacatccattctgcagcccatggatcaaggagtaaatccaacaatcaagactgtaattttaccatagagaaacctgcaaacaccaccaccttaggaagtgatcaaagcacgtatcaccagtagtgggacaaaacaaatcatgtgctttctgatgtgatgcactgagaagaacagtatattttctgtcatattactgccaaaaatgcatgaccctaatcatcaaaattaccagtcataaatcatcaaaaaatatcaacattaaaacaaaaatcaaggaactagactagattcaggttactaaacagacacaacaaaatgtaacacgtgatccaggattttattttgctatgaaaattatcaggaccattgactggtaaaatttgagtaagatctgcagatctgataatgacattatattgttgtttattgcctcattttttgtttttttgacacagtgtctcactgtgtcacccaggctagagttacactggcgcaaccaaggctcattgcagcctcaacctcctaggctcaagtgattatcctgcctcagattccagagaagctgggactacaggtgtgtcaccacacccagctaattttttttttctcatttttttgtggaggagggcttgccccgtattgcccaggctggtctcgaactcctgggctcaagccatcctcccacctcagtctcccaaagtgctgagaattacaggcatgagacactgcacccagcctgattttgataattatatcacttgtttttgaaaatacacaaggaaatatgtagatatcaagaggcatatgtacaactcactctcaaaaggattaaaacatattcatacatacaggagagtgataacagtcagggtggtaaacacaaaggaatttttattattcttagaactttcaagtctgaaattacatcaaaataaaaaatttacacctgacagataggaggcattcaataaatttttttttaagtttaatttccccaaatcctcaagtgaactgatgcttcggtaaggcagggtttctgctctgagatcatgctgctaacttttttttttctttttttgagatctgtcgcccaggctggagtgcagtggcgcgatctcggctcactgcaagttctgcctcctgggttcaatgccattctcctgcctcagcctccctagcagctgggactacaggtgcccaccaccatgcctggctaattttttgtatttttagtagagatggggtttcaccgtgttacccaggatggtcttgatctcctgcccttgtgatccacccacctcggcctcccagagtgctgggattacaggcatgagccactgcacccggcccatgctgctaactttttatataaatgtgggaaagttactgaacctccatatctgtacctcagtttcctcatttttaaaagagattataagagtgcctgaattcctacttgttggaatgatgaaattagataacgtgtaaaccatttagaatagtgcctcccaggcataataaaatgcattaatgtttagcccttttatagcactttttacatattgattgtatgattttgtatatccttgacagtaattaatgtatttccacatcaataatgataatggcactacataccaccctagcctttctagaatgaccttacgtaacagttttcccaaaggaaaccatcccatgtctactgtgttgggcaaattcaaggtacttgaggcggagaggttggaacagagctgcatggtaaaatagttatttccagactaggatactacaccttcctcccaaaggcaaagtctatatataaccctttattccaaaccatgatacaacctgactatccaattgcttaagtcatacaatgtaagttacatatagaaactttggaagaaatatatatatatatatatatatatgcagaaaaagaaaagagaaaaaggtcaaccagcataaaaatgacagataataaaataattatttcctattatatcctgggggacagagcaagaccccatctcaaaaaaaaaagaatgtaaaaacattctcattacataatataatagtttagccaggcagggtggctggtgcctgttaatcccagctacttgggaggctgaaggaggaggacagcttgagcccaggagtttgaggctacagtgagccatgactgcaccatgcactacagcctacgcaacagagcaagaccctgtctcaaaaaaataaaaacagtttaaacagatggttttaatcataatcgtagctaacattattgtgtattaggcactatttaaacacattgcattactgattaaattaattctcaccacacctctgaggtacatgttaccacgcctctgaagtacatattacataggcagaggcacagaaaagctaagcaacatgacaaagtaaaagaatttggatttaaactcaaaccccatgcttaattattaacctactgcatcataagacaattaaatgaacttttcagtcatatctaatacttcattcctcaaaacattactcagtcaggaaattttaacactgtagtattaaatacttttttttttggtttttttttttttttgaaacaagagtctcgctctgatgctcaggctggagtgccgtggcgcagtctcggctcactgcaacatccacctcccgggttcaagctattctcctgcctcagcctcccaaatagctgggatcacatgcacctaccaccacgtcaaactaaattttgtctttttagtagagacagggtttcaccatgttggccaagctggtcttgaagtcctgacctcaggagtcatctgcccaccttggcctcgcaaagtcctgggattacaggcatgagccaccgtgcccggcctattaaatactctttaccaaaaaagttggtttctccctcaaacaaatcaaaatgaagacaaatagcttacatatgattattaaaaatcaatcaaagatattaaacaaagacttagacacaacagtaaaagaagctactaaggaaaaaataaaatgaatgtcatcaatatttaaaactttcatcctcaaaagacaccaccaaagaagtgaaaagacaacccacagaatgggagaaaaattctacaagtaatatatctacaagtcataaaggactgtatccagaacatataaagaattcttacaacaataaaaagaccccccaaaaaaagtgaaaaataagcaaaagatctgaagaagcatcaaacatgttcaacattactggtcattagggaaatgcaaactgaaaccaagagataccacttcacgcccattaagatagcataaataaaatggaataataacaatcattggtgaggatgtagagaaactggaactctcatatttctggtgggaatataaaatggtagagccaatctgaaggagtctggagggtcctcaaaaagttaaaacataaaacttgccatacgacccagcataccatctcctagcgtgacccaaaagaaatgaaaacatatgtctaaacaaaaacctgtcatgaatgttgataagcagcactattcataacagccaaaaagtggaaacaatacaaatgtccatcaactgataaatggataaacaaaatgtggtacatccaatgggagaattactaggcaataaaaagtaaaaaaagaatgaagtattgatacatgctacacaaatgctcaacatactaatcattagagaaaacattatgcaatgtcaaagaagccagtcacaaaatcatattttaagagcccgtccggctgggcgtggtggctcacgcctgtaatcccagcactctgggaggccgaggcaggtggatcacaaggtcaagagatccagaccatcctagccaacatggtgaaaaccccttctctactaaaaatacaaaaattagctgggccaccactcacctgtagccccagctactcgggaggctgaggcagaagaatcgcttgaacccgggaggcagaggttgcagtgagccgagatcgcgccactgcactgcagccaggcaagacaacgagactccgtctcaaaaaaaaaaaaagggcccattcatataaaatgtccagaacaggcaaatgcagaaaaagaaaatgtatcagtgattgtgaggggctgggggagagggagggactggcaagtgactgtaaatgggaatagggtttcttttagggatgatgaaatgtattaaaatttaatagaggtgacgatggcccaactctgtcaatatactacaggttatataccccttatccagaacgctggggaatagaattgtttcagatttcgtatttttccagattttggaaaatttgcatttgcacttacaggttgagcatgccaaatccaaaaatccaaaatctgaaatgcacactagaacatcatgtttatatacagaaagtttcagattttggtgcatttcaaaattctgagttgggatgctcaacatgtaaaaccactggattgcacaagtatacagtatgtgactatcttagccattaaaagtttttgttaacattcaaaatgtgaaatttcatattaatctctgcagaatgctgtgttttcatataaatttggggtatattcattcaaagtaaagaattaagccaaattcatttaagattatcttataacattttaaagttttccactcacatgtcttacagagcttgaagactcatttccagaagataactcacgccagctacgatttcttctaccataatttggatatttacgcctacatgtcctttgtctagactgtgataccaaaaccactgaatccgactgaaacacagaaaaacatgcgaatgaaaatcaacacctaaataaggacaatatcaacaaaatgggcattccgtcaagtttccagaaggatttaaagcaaaaagaaaaaaaggcttaaaaagaaggtagcatttttgccatacagttttaactcaagcttagtagttttacttttaaggtccttagaaaacatgagaaaatgcacattagatgggcattttccaaactatgctgtaagttaactggtttaccacgaatgagggaaaataacaataatctgaaaaggatgtcaccttaaaagtatacatctcagaaatgaaaaatacatattcgtacattatgatgcagtaagcaacttctcaaggaatttctcactatctctatacataggtgtaaagaaaaaatgttcaacatactaatcattagagaaatgcaaatcaaaaccacaatgagataccatctcacactagtcagaatggctattattaaaaagtcaaggccagacgcgggggcttacacctgtaattccagcactttgggaggacaaggcaggcagatcacttgagcccaggagttcgagaccaacccaggcaacatggagaaacctgcccctaaaaaacaacaaaaacaagaacaaacaaacaaaaaacgaaaaattagctgggcatggtggtacacagctacagtcccagctactagggaggctgaggggggaggatcactcaagcccaggaggttgacgctgcagtgagtgagccatgattgcaccacaacactccagcctgggcaagagtgagaccctatctcccaaaaaaaaaaaaaaaaaaaaaaaaaaaaaaaaaaaaaaaacactggggggtggagggcatcaaaaaatagcagatgctggtgaagttgcagagaaaagagaatggttatacactgctagtgaaactgtaacttaattcaaccactgtggaaagcagtttgatgatccctcaaagaacttaaaacagaattaccattccaccgaataatcccattactgggtatatacccaaaggaaaagaactcattctaccataacgacatatatacacctatgttcactgcagcactattcacaatagtataagacatggaatcagcctaaatgcccatcaatggtagactggataaagaaaatatggtatatataaactatggaatactacccagccataaaaaaaaaacgagatcatgtcctttgcagcaacatgggtgaagctggaggccactatcccaagtgaactaacatcagaatagaaaaccaagtaccacatattctaacttacaagtgagagccaagcattgagtacagaagggaacaacagacatcagaacctacctgagggcacaacgtggaaaaagggtgaggaccgggaaactacctatcaagtacaatgcttattatctgggtaacaaaataatccatacaccaaaaccctatgactcgcaatttacctatataacaaacttgcacatatacccctgaagctaaaagttttctttttaatgttcaaatattaactgtaagtatgtgtattttcaggtttttaatgtttacataatttgttgtctgtgcttttcagttctgaatgttttaaatatatttttatcaaaacagaataatcattcaaaatcagccaaataaagtaactatattggttttagtttttttaaaaggcatgccattccccaaccacaaaagcagatgagattacccaatgagagcacatattccttacatttatgcacaaatcaattttcacatgagtggccatctgtctaatgagcactggtcagttttagaatttcaacattatcactggatgatcttaaaatgaactgaatgttccttaatttgtcagtactgattttggcaaaaactcgtattaatgagtttcacgagtgataataggttaacatgtaggtgggccaaactttcactaagaaaaactagaaaatctggtaaaacatattttttaacaaatctgtttaaaggcactttatgccttaaaaggttatgaagaatcacagaaccaagatcaaaaaaagaaggggggtgtgtgtgtgtgtgtgtgtgtgtgtgtgtgtgtgtgtgtgtatacacacacacatagatatatatatattttaaccctagaatttcattctggaagaggaagctggaaggtttagcaagtaagcaaaatcacagactaactcatgagttaggctaataaacttgcaattcatggcctcctatatgtaggggactccctcgggctttggctgttagcccaaaaggctacagcctagacctgtaggtaaactacagatagaacagtaatcccaaggaactaaggcccattcttgttcggataaggcaataaggcttgagagtggccccagaaggctgccagaagtcaatgtaaatcgtctctgggaataaagccatcctgtgcttcaaatcttttctaacatttaacaatcaaaaaagaaacaaaaatatgatgataaaaaaggagaaaaatcaacaggcaatagaaaatggtccacagggaagcaagacattgaaaaaaatgaaattaccagacctgtttttaaaatagctatggctgctttccaagtaattaaaacaatgagaattttagtagaaaactgagagcccttaaaaaaaaaaaagaagaaccaaatgacaattcagaatcaaataatttagtaactaaaattaagaactcaataccattgttaggcactaggcaatttttctcaagttttcaaactactcctttctaacagctatataaccttaagtctactattttaaatctcaaacagaaaaccttaagcaagaaatactccacttcagatgaaagttactgatagttttataaatcaaaaagaaaactctatatttcaatgtaatttctaatttgctaagaaaacagaatttaggttaccttatgtgagagctgaagagtctttctttttcttcctattatataaagatttctttcctcttcacctttctctaatcggaagtcttccagcttcctacaaatttaaatacccagttatattaactactgaactgatggataactaaaggatataaagaataaaaaccagtgtgattctataaatcataagtttatgtactttaaaaatacacaaaatctctgaagttaaaacatgttaaaaatttatatgaatataaataaaatctcagaggcagttaaacctatttttcatatcagaggcaaaaatattcattcgttttctgattggtactatcaggaccaattcaaacagaatctcccataatagcttttcaaaacgtcttcatgattttccaagattgcaattcctttctctaaagaaaaaataagcagagtctgccttctccacatttattcaagctatgtttgataatttatagaaaacaagaatagcaatgttactggtttttctaatcacctatatttcactcacatgatacaacaaaaagattatgttattgtgaccaatttcaaagcaaaggacctgccaccaagaagaaggtactaaaaatcatttttcttctctggaaaagactgactgtcccttttctccaactggaacattattaaaaacacgtggcttttatgtttttgtttactttaacatctcaaaggaaaaagatttatactgaaatcttggccatgttccaaggtataactagacactcaacagagtgtaagagtaaatgctgtaaggataaaaactgatttttaagaacactgcatttttctctaagtacgccagacagcccacactcaagattacagtagaacattattttatccagcggggatttctaaagcagactcaacctttcacaggttgtcaatttcactgctttatgtgtgtttaaggaaccatataacgagattttcagcttgcagccaaatgaaagtcccacctgatatctgtatgtttccctttgacaataaagcaatacatacaattgattctcaatcaataaaacaaaggaacacttgacataggtatcattttcagctgcatgcaattttactcctaatgagatggtcagctaagaaaagtggtattagcaaagatcatagagtgtatataaaagaatttttatacggccgggcgcagtggcccacacctgtaatcccagcactttaggaggccaaggtacatggatcacctgaggtcaggagttcacgaccagcctggccaacatgatgaaaccccgtctctactaaaaatacaaaaaattagctgggcttgccagctactctggaggctgaggcaggagaatcgcttgaaccagggaggtggaggctgaagtgagccaagatcacaccattacactccagcctgggcaacaaaagcagaactccgtctcaaaaaaaaaaaaaaaaatttataatgaatagaatttctaccgttattggatcaagacaaactacgtgcctgaatcctaggcacaaaaagaattacttatactggcaagcaacattatatgctcatagctctgcacagctgtcatttacctttatgcttttatatctattactccaatttttcacattggacacaaacttttatagtcagaaaacaaatttttaaatactcttcatccttatcaaatgatatcctaacatacagttatgaaaaattcacccttgtttccactattggaactgttgtcatgggcaatgatcaccacatctcaatcaattatcgcctttataaaatttcacatgagctttcttttagaataaaatgctagaaagagctatgttcttttttgtgaaaattatattatggcagatagctagctgccgttctccttttcttccttagaaacacaataccaatttttatccaggttctttgctgctctaaatagatactgtgttacctactctcctccttagcttattatggtcaaatgacaacattctggtcaatgagttataagcagaaatgccacatggctacttaaagtaagttcctttgactagaaatgccctttttgacatctgaacatctttcttcttttcttctaaatttcaacctacatcacaaatacagatatgtaatagctacagcttcagcagctatcttggactatgcggtgaccttaagactagaagccaaggctggatgcggtggctcacgcctgtaatcccagcactttggcaggccgaggcaggtggatcacctgaggacaggagtttgagaccagcctggccaacatggtgaaaccccatctctactgaaaatacaaaattagccgggtgtggtgacccatgactgtaatcccagctactctggaggctgaggcaagagaatcgcttgagcccaggaggagaggctgcagtgagctgagatcatgccactgcactccagcctgggtgacaaaagcgaaactgtctcaaaaaaaaaaaaaaaaaaaaaaaaaggactagaagccaagctccacgatggggatgagaaacacaggagtctaagttcctgattaactgtggaaccactattccagccttagattatttctagtcttccttcggataagaaaataaatgcttgtgttttaagaaactaatttttcaggtctttctctcttgacacctgtttgcttcccttggttttgaaaaagcatcccaaaatgacacttttggttctgatgaccataagacttagacgccaatttaaaacttaattacagcatactatatacatattgattttctgtatttctcatcacaattccacattttgcttttcactattttctagtccttcccaaattcacagaacaatatataagtactatctaataacactccagcattcactgaaactcttctggttaaacatataaaaacacaaagataaatttacaaaattatcttcaagctattaagttattatgacatacaaacatgagaaaatactgaaacattttagatatcattctaaaaagtatttcctgtttccatttcaataactcaaatcagtacattacaactcagcaccaaggacactactgcccatattataattacaaaatatcatttctacacttgatcttagccaaaaggccaagaagcaatataaaatatcatttcttaggctgggcgtagtggctcacacctgtaatcccagcactttgggaggccgaggcaggcagatcacctgaggtcgggagttcaagacaagcctgaccaacatggagaaaccccgtctctactaaaaatacaaaattagccaggcgtggtggcgcatgcctgtagtcccagctactcgggaggctgaggcaggagaatcacttgaacccggaggcagaggttgcagtgagccaagatcgtgccattgcactccagcctggacgagagcaaaactctgtctcaaaaaaataaaagaaataacatttcttactaaaagaaaatagggctgcttaatttcagatataggtcaaaaatttacaagatgaactataatatcttcccctgtctcatagtaaggatgctatggaaaactactagtcattttgaaaggacagggagccttagaaaagaggctcctcatggctagaaaagagatgatttaaacatcaataaagaatatcagaaataagttaaaccccagctatttgatttatacattaaaacacacacacatacaaattggtcgctgttgaataatgaaaaggaataaatctttattttgaggggaaataaagcaaaataatcaagccatctactctgcctttcctacacaaactttgctacttgaaaactaagtatacttgggtttcttttttagatttctttttcagaagtgtccaagataataaatgaagaagttttcatagagttaaaaatcatgattatacaacagctaataaattaatgaatctacacattaagcactgatagctgctaacatcacaaaaaccgaggaggctatttatgtgtgccttctgatagaattatcacttatgaagcagtcttgcaaaaaactgaaaacatttatgacacctgaaacaactggaaatttaaacacagcctggatatttggttatactgagaaaccaaggtacggtttttttaaggtgtgataacagcattattttatatattttaaaatttcttatctttagaaatacacacttatacgcttatggacaaaaataatattacatctagaatttctttcaaaataatactgaaaggacaaaagtgggtgtgtgtgtgcatggacaaaaaaagacggagccgggcgtggtggctcatgcctgtaatcccagcacactgggaggctgaggcaggtggagcgcctgaggtcaggagttcgagaccagcctggccaacatggtgaaaccctgtctctactaaaaatataaaaaattagctgggtgtggtggcgggcgcctgtaagcccagctactcaggaggctgaggcaggagaatcgcttgatcccgggaggtggaggttgcagtgagccgagatcatgccaccgcactccagcctgcgcaacgagagcgaaactccgtctcgaaaaaaaaaaagaaaagaagcaagactggctctgaaaacctttaatgtagtaaaaacattagagaataattctgacattttcctaccacaattaagatagtaagattcccactcattactaatatatttatacaattatttacacaattaatggaatacagaatgtgtaaataaccatataaatatattttcacagatagaaacattataaatagatatcctaaaacaaacctaaatatgcctagtggtacctctggtacaaccactcttcgtttccaagcctgcaggtcacgttctgtagcaatctgactgcgtggagcgttttgatgcatctgacgaacaccttcaacttgtccactacgacgcagaccaatatttggaggggactgaatgtctaagctcagccttctaaaacctaggaaaatatgatggggaagtgattccaatacacttttaaactaatatacatttagcatgtaacaagcacacgttcacctaagatgcgcaccaaaaataaagaactaagagaagatagtatctactgaaaaaactttgtgagaaaaatctttttaaaatttattttctgtacagacaaggtcttgctatgttgcccgggctagtcgcaaatgcctggcctcaagcaatcctcttaaccacggcttcccaaagtgctgggattataggcatgagccactgcacccagcctgacagaatcttaacatgactaagatcaaaatgtagaatacggaacaaacattaactattaaacctcaatttcaatttttactagactttctgaaattataaaatgtacatttcacattacattatatatgcattcctaaaaactgtgccttcttaaaaattgcacactaaaaaaagtctttttgaaaaatttgcactgaagacagatacctgaaatcaaagtggttttacaagagctcttgcaacagtaatcatgattctcatgattctcaagagataatctgagccaccaaggcaagtagctgtcaagatggttattaaaaagtcaaacaaataaaatgttgtgggtaaatgccagtcgtgcttaaactaaagctgggcaggtgggtgatgaggcaatgaagacaacactgacgctctgagcctgaggggctgctgttaaggtgggtataggaggctgcgcaacctcccatgagctggaagccacagaggctgttaaggtgggtataggaggctgcgcaacctcccatgagctggaagccacagagagactagcctctgaggaggaagtcctagacaaagtgctcattttcttacaacagaaggtgaaggggctcctgctactaacacaacagaaaaactgagggtgatattgattcttgtgggaggctatggagctgtactccagctgtgccagctcttcttgcctagggaaaaatccacgagtgaatgcaacttctgcactcttctatgtaccacactctatttaccaatcacatgtgtaccaatgtgcattagagaacacactatgcttcaccaacttcaaatggcattaaatgccccgctagtaaaccaagcatttatattaaaatactatatattgaagaaacatttttgaactgagaaatataaattctaaatttaactgcccaagtcatagcattattctccaacaatctgaaaacatgcataaagttatttatcacatcacttataacagcaaagcataagaaacaacctaaatgcccataaagagattagaaaggttaattactccacacagaggagtagtatgaagctatttaaaaaaaaaaaaaaaaaaataggatgaagaattctgtgaactgatacgatttctagaatatattgttaaggcaatacagtaggtgccagaagaatgcgtttatgtatcttgtgcctcttgccatgacagactgaggacatagcatcaactattcagtattcctgtctaaatgcttaacctgaacccaattatgaggaaataattagacaaatctaaattgagagaaatcttgtgaaaacaacaggcctgaagctttccaaagtaccagtgctctgaggaaacttttctggattaaaagacataatcctaaaatgtaatgagcagggctaattaaatcctaaattttttttttttaaaaaaggccatgaggaaggacagttagttattgggacaactggggaagagtaagtaaggactcaaaattagatagcagtgctatatcaacaattatcatattcagcttgttgaatgtgatcactgtattatggttatgtaagagaatatctctggttcttggatgatacaggatgaagcattaagatataaagtgtcacaagtcttactttcaaatgcttctgaaaaaaaacacataggaatgtgtgtgtgcacacatacacaaaaaaaagcaaaagcaagtatagtaatataaggaatctaggtaaagaatatatggctgttcattgtatccttcttccaacctttctttccaaaataaaaaaacaaagtcttatgctgtaagtttaagagaaaaaaagtactattttaaatgaataatgaaacttgttaatcatattggactagaaacaaagtaaatagtggaactaactgaggggagactggtgattgttatgtatttacttctacactgtacttttaaggactcaacactgaaaactcactaagttttcaaactttctgattcaataagaaaaatcatactctacccaatacagtttttcaaaaattaccaatgttaaagcaaagaaaagctagaactatggttttattttaaaaaccaatctgttattcgctcctatttaatacaattttgtaaatactgtatttttagagtacaaaaggcttcagcagtacttgaaattcaaagacccatttgttactacattatctcacacctcataaagctaccttcagactactaattaagttgtaaaaatacattgtttacttaagtttctcacattacatgtacctgacaaagacttcgtttactctttaatttcaatgcagccatattcaggtaaaacatttatcactatttattacctctccggggtgtttcttcaccatttgaaagtcctcttggaatagtatcctgatctgctcccattctctgatcttgctgctgctgcaactgtcttatcattccatcaagaatactcgattctgggctgcgttcatcattatcattggtttgcaggcttataatttgttcaatcacctctccatcacctacaaattcaattatttaatatataatcatataaaagcagaaaacaaaaaaaaatttcgttagggtacaaattaaaatacattaacaatggtcagaatttcccatttttgaaaaataaccagtttaaaaagatactctacatattcaccaagaagtcagagaaaagattcaaagccaacaaaagtcttcctgtagaggactaaataccacaaaaacctgaaagcagcctctgaaattcctgcaagtggaagcatggaaacatatttctgtaaaactttattacgctgtttcacactaatgcccctcaccatactcgatatatttcactaaaatcttattccccagagtctctaactggaacagagcaactatgggtcatttccaatgtggagaaaaatccctgagatttaatttcttctctatgtcttaagaaaggggaaaaaagggaggtaagaccttttttaagccttcaacaagactttagctctccctctgccccaagagtcctcggagaacagtgcaattgatggtggtaattacacaagcctctccgactaatctcaaattactctcttagatatgtttttaacatagctactacccataattcttacttcaagtacagagtttttctgagacggagtctcacttttgttgcccaggctggagtgcagtggcgtgatcttggcttactgcaagctctgcctcctgggttcaggccattctcctgcctcggcctcccgactagctgggactacaggtgcccaccaccatgcccggctaattttttgtatttcttttttttcagtagagacagggtttcaccgtgttagccaggatggtctcaatctcctgacctcatgatccacccacctcgacctcccaaagtgctgggattacagccggggcgtggtggctcacatctgtaatcccagcacttttggaggccaaggcaggtggatcacttgaggtcaagagttcaagaccagtctctactgaaaatacaaaaaaaaattagccgggcctggtggcgcacgcctgtagtcacagctactcaggaggctgagtctagagaattgcctgaacccaggaggcgaaggttgcagtgagccaagattatgccactgcactctagcctgggtgacaagagtcaaactgtgtctcaaaaaaataaataaataaaattaaaaataaaggagattaataaggtgataatcaaaaggaatgcaaagatataacttgccaccataaagacagatagagaaactgtaaaacctcatatagtattatgggatgggcaagggaggacatttccatcctgctacctgagtaagactcccttgcatatcactgataatgtctttgttttgctatggaaaccaaagaagaacttaaaagagctaaatgttatatctcatattaactttgtctttaaaaattttatcagtctcaaaaaatgagttgaaaaggcagtacatagaggcttaatctaaaaagataagaagattttaattagaattgcttataacacaaaattcctaagattacaacatgataccaaagggaaaacggcaaagaagatttctaatcggcataagccaaaataacctaaggctatataacttttcttttttttctttttggtagacacaaagtcttgctatattgcccaggctggtcttgaactcctgagctcaagcaatccgcctgcctgcctcagcctcccaaagtgctaagattacaagcgtgagccactgcactcagcctaacttttctttcatagcacagaacacttaactgttaatttctcaaatatcagaatgttaactgtctctatggaataatacaatcgatactgaaatattgaaggagggttctacccatgaaaacttaactgccgcaggaagtgtccttctgccataaacaactacaatactggaaaaaatatatgtaaaacaaaagctttcagacactggacaacaggcagcacaaaactgtgatccctgagagaaggggaacaatggagacaaaccctctgattgctccagattactgtctggaggtagtctccaggttacagaacaaaagagagaacccaaacagcatccacagatctaactgagttgaggagacagaggtgagagtttgctggaagaagaatgttaaaatacgcaggactgaatatcagaggagagtgaactgcacacaaagctccaaagatctgtaatgaggtctcatcaattatttgactaaatactgatacgtggccgggcatggtggctcacgcctgtctgtaatccctgcactttgggaggctgaggtgggcggatcacctgaggtcaggagttcgagaccagactggccagcatggtgaaacttcatctgtactaaaaatacaaaaattagcctggtgtggtggtgcacacctgtactcccagctacgtgggaagctgaggcagggaaactgcttgaaccccagaggcaaaggttgcaataagccgagatcacaccaatgaactccagcctgggcaacagagcaagactctgtctcaaaaaaaatttttttaattaaatactgttatgtgtgcacatggggtagaactccactactgaggggaaaatataaaaaagcagttgcacaaaaatttgcagagctctcacaggacagaaaatagttcaagttcgcaggagccagaatacacagcagaagtgctttacgtacacttccagttttaatacctagaatagtaaaaagacatgtattcatgtgcagagcagtaaagaatataataactcctactattttggtgccacaaccaagatttgtgctacagtgccagaagtttatttctacccacccatgatccatcagtacaaatgtcaacactgtaaaaaaataaatatctcagtattgttatgaagatggctgtgaccttgcagactccatgaaaggttgcagatacacctatgggtctgcaaaccacacattgacaatttctgccctaaagcaaccattacatacaaataaacaggtattgctagtaagacattagtggaggtcatatggaacacaaaaaaaaatcatcaatcccaaagaagaaaaaaaaaagaaaaaggaaaaaggcacaaagaatgaaaagaatatagaggaaacaaataggaatactcttatgttcaaacccataccatatgaacatttaagtgtaaatactctacacttaatagagtacttaatacttaaatcccaattaaaagttatcagattagatatataaagacacagatcagctggaagaactgacaaagatataccatgacaatcctaatccaaaacaagttgaattggctatattaatatgaaataagactcttcaaaacaaaaaatattttcagagatacagagaaacatttcatgagaaaagaattatttcatccagaagacaagcaattcaaaatgtgtatgcacctaatgaatgaactttaaaatacataaagtaaaaactgagtaaactgaagagagaaatgacaaattccacgtgacagttggatatttcaatctggatgatagccccaaactggaaacaagcctttaaccattagtgaatgcaaaaacaaatgataatatacccatctattccatggggtattatcagccccagtgaataaacaggaacaaactactgatacatgcaacaacactaatgaatctcaaaagcaccacactaagtcaaagaagccagacacaaaagattacactttgtggccaagcgcggagcctcatgcctgtaatcccaccactttgggaggccgaggcaggcggatcatgaggtcaagagatcgagaccatcctggccaacatggtgaaaccccatctctcctaaaaatacaaaaattagctgggtgtggtggcacacacctgtagtcccagctactcaggaggctgaggcaggaaaaccacttgaacccgggtggcggaggttgcagtgagccaagatcatgccactgcactccagtctgccgacggagcaagactccgtctcaaaaagattacactttgtatataaaaccctcttaaaggacaaaattaaagtgacagaaaatgtaacactgattacaagggactgggagaaaggagaggactgactccaaacaggtcctggggacttttgggggcagtataaatggtttgtatcttgattgtggtggtagttacttattatttaacatctgtcaaaacatacttgacagcctgggcaacatggcaaaaccccatctctactaaaaatacaaaaattagccaggtgtgttagcacacgcctacagtcccagctactcaggaggctgaggtaggaggatcacttgaccctcctgcagtcagccaagatcgcaccactgcactccagcctggggaaacgagtaagaccctgtctcaaaaaataaacacacatacacttgaattgtacacttaaaattggtgaattttgtatataaagtacacttcaataaaagtaataaaaaataacatttgaaatagcaaccatatagtaatctacattaggtttttactttatatatagctggtgatttagtttcagtaaatcctcatccaaacaaacaaaatagcattttttctttaacatctgtagagaaacactgccctgctattaacacaaaaaagaactttgcacttggctacgacagagaaaagtacaagacaaacctggaacatcctacatccagaaaaggaaaaaagtgactgaaaaagtgtaaggacttggggaaggacagcttcaaaaggctctgagagtcaaacctaaggattatgtgagtaatacaacccattagccacacccagaagcccatactaaaacttaataagcctcatcaataaataaaggggtgagcaatagacagtcatatgcaatgatacatatgacgcaatgagggagcaatgatacatatgatgcaatgacagaacaatgatgaagttagaaaataaccactttggagtattcacagtaacaaccgattcaggcaaaactcatcaatgggtcctaaaacttgagggtaaactttgacaatgaacaggttattgacatatctccccacaaattactattaattacaaagagaaaaatactaagtttatagtgttcaaaaacaacattaccagtaattagacaaaccacaatcataagcatcctgacagtatgctctattaagactagaacatcatttatgttgtattctgtcaaaaatgcataaccggaacctaatcaagaagtagacaaacccagattgaggccttctacaaaattcctgacctgtaatcttcaaatacatcaacatcatgaaagtcaaaaactgacaacctgctccagattacaggaaattaaggaactatgacaactaactttcgtatttcgtatgtggtcccaaataaaaattgggagaattttagaagctataaacgaacattactagaataactggaaatttttggttacacactatagatttgataatagtattatctgagtgtaaaacgtcctaattgtcataagtgtctatagttatgtaagagaatgtcgttcttatttagaggtaaatggtacatgaggtccagaagttaaatggttcaaaacaatacacagaaaaaaaataataaaacaaatattgcaaaatattaataattggggatctaaaggtaaggaaattatttatattatactttaaaatattcaagtacaactttaaaaaaaaaaaaaaaaaaagactgcacttacttgttgccacatagcccagctgtggaatcaaatgttcatctgcagaattttctcggcctggtactaatctctgatacttggttggatgaggatttccatctacatctaccaagaatggtggaggcataagatgaggagcctgctgagtttgctcatctaagacataattattagaatctctaataagtggtcgatagtcagtatggaagaacatctgatcaggaatctagaaaaatgaagttcacaggatgacattttaaggttcacacattttaaaggaaacaaatattaaacagttaattaaaactagaaaaacaaggaaatcaaatcactcagctaaactgtttccaaaacatagctcataactacttatttccaaaacacagctgataactattacttgcatgctacaacaaagtattaaaaatgaccttttcatatggtttgctgcatccaaaaccaaatatcagaaggtgcccatgagaatctgtacaggcaaaatgctgtccatcctgtgaaaacttacagtcaaacacagctccatgtccttgtccttcaatctaggaaacacaaaaggaaaaaagttaggaccaattctatgcaagtgatttgctatgtaaacttttttaatgtggataacctgtgacaatatatcccttctgaaaaaaaaaaaaaaagtttcagccaggcatggtggctcatacctgtaatcctagcactttatgaggtggaagcaggtggactgcctgagcacaggagttcaagaccaccctgggcaacatggtgaaaccctgtctctactaaaaatacaaaaaattagccgggcgtggcagtgtgcgtctgtagtcccagctactcaggaagctgagacacgagaatcgtttgaaccggggaggcaggggttgcagtgagccaagactgcaccactgtactccactgcactcaagcctgggtgacagagtgagactctgtaaaataaaaataaaaacaaatgtttcattaagcatatacatcaatcactattccaaaaaaataaaattgattttggatacaactagcctagaaaaaagtcttcaaagttcttctaagcattagttctccaagtgctccaatgaaggctaacaacccaatccaaagtgaaggcttcttttacttcttataaacaatttcataaatttttgtcttagtatataataaaaggataataagctacaagataaatgattaaagattaaccaaatttggtattcatgaactaaaacgaacacttttctagattttaaggtgggctctacttcagctcattactaagatgactaagcaccatgcaaaatttggcaatgctgccgggtctcaagcatatatatgaaaaagtctgcagccacaactaccctaacagagatttcagaaaggatgctctaagtctatcatgagtgtaaccttaaatagattacttttatactgttttattcttccttttaaactgtaaactatattagtttaatatcatcaatttatagttaagttagttatttggttaactctacagtgtagagctatgcatatttgttgtctgcacctttaactttccagtaactaaatgttacgcgttcggtgttggagaaatgagacatctactcagtaactgccagaacaaactcacgtccacgcccaagtaagtcactgcttgaatagtgatacttcactattgttgcacatgaaaaggatgacaattagcaaacgtggaaaaaataaagttactcggatattcagaggattgctgaataagatgtgcatattaattcatattctcttaacataaaaaggaaaaaaattgtgtgtgtatatatattatatattttttttcctccaactgatcattaaaacataagaacatggtttcacccacatggtccttctaggagccacctgtgccacagcacaacctgcatatatgtaccattttgcatccctggcctgggaccttcagtcatggttaaagcagatgccagtggggagggagtggcaaaatctcaaagctggaaagctgaagatggtggcagcaactctgcccatcatacatgtggacttaacagcaccaaaagcttttctataaatacttgctgagatgaaagttttctcaagtgggcagacctatctaagcagagcaaggaggacttggggtttcacttgtaactggaagcgtcctatacaatgattcctgacaaaacgcaacctgcaactgtgtctggagaaaaatgtcacattaaagtttattacgtattcatgaaatattgttgctattaataactgacaaccctatttagtctatctagaattaggaattatgagcctcttagctgagcagtaaggaaatgtcagtaaacaaggccaattttggctatgcaactggaaataagatcattgttgcccacgtgaaatgttttttcagattattctttggcatagagtttttccgcttatattctgcttaaagcctaaattaatgtagttttttgttttgaggagttaaattcaggatgtaatattattactgagtatgaaaggatagttaaggtaatggatgtatcccacggattttaaaacgacagaaaaattgtccaagaatgtttagttctttttccaataatttgaatacacagaaacgcagctttcagagatgcctaattgtctatttgtactttgatcatactatttaaaatgttttagaatgcatttaatcaaaggtctaagaacctgagaatcaaaggtctaagaacctgagaatcaaaggtctaagaatgcatcagcatcaataggatgctactacactgcctctaaaatacatcacacaggccaggtacagtggctcaagcctgtaatcccagcactttgggaggccgaggcgggcggatcacaaggtcaggagatcgagaccatcctggctaacatggtgaaaccccatctctactaaaaacacaaaaataaaattagccgggcgtggtggcaggcgcgtgtaatcccagctacttgagaggctgaggcgggagaatggcgtgaacccgggaggcggagcttgcagtgagccgagaccacaccactgcactccagcctgggcgacagagagagactctgtctcaaacaaaacaataaaaaattgcactttgaattgtaacagtataaactgaagagtaaattcacaaaatgtctcaaacatataaagccttaacagtgctaaaacccttttacacaataattccttcagaatttatcttagggaaataatcatgtacaaggctattcaaagtgttattgtcatacgtattttagaaaccacttaagtactcaacaatagaaattaattgtgtaaaagttaactttcttctcagacaggctgaatttatactcaaaaatacatctgtaaattctttaaaaataaaaatttcaaaaaaaaaggttttacatgaaataagattacaaaactatgtgcaagcacatttacccacgtaaccaacctgcacatcctgcacacagcaggtagcccctgaacttagaagttggaggaggaaaaaaaaataccactgtgtgcaaagacaccaactaataaatatggaaggaataatgccattggaaaatcttcaatggatccaatacttgtgggtaaaaatttaatgagaaacaggatattcagattagtctcaaaagcgctactaaaaaaattagtttaataattatattgggaggccgaggcgggtgatcacttgaagtcaggagttcaagaccagcctggccaagatggtgaaaccccatctctactaaaaatacaaaaaattagctggatgtgatggcaggtgcctgtaaatcccagctattcgggaggctgaggcagcagaatcacttgaacccaggaggcggaggtcgcagcgaccccagattgtgccattgaactccagcctgggcaacaagagagaaactccatctccaaaaaaaaaaaaaaaaaattatcaccatagtaaggggacaaataaatatcatgtgcctcctaatatgattcatgaaggacacaatatcacttatgttttatttcatttaaaaaactataacaatctaatcatgaaaaaatatcagacaaaactgaggacactctgtaacaatacttgctaatattcaacaaaagttaaaggccaagaaagaggaaaaagaaaaaaggctgagaggggctggtgacaattaaagaaaaatagaggccaggcacagtggctcacgcctgtaatcccaacactttgggaggccaaggcagatggatcatgaggtcaagagatggagaccatcctggctaacacggtgaaaccccgtctctactaaaaaatacaaaaaaattagccaggtttggtggcgggtgcctgtagttccaattacttgggaggctgaggcaggagaatagcgtgaacccgggaggcggagcttgcagtgagttgagattgcgccactgcactccagcctgggcgacagagcgagactctgtctcaaaaagaaaagaaaaagaaaagaaaaaaaagaaacctagaaagatacaaccacttaaacacaacgcatgagcctgaactggattctggtctacggagcaaaatatatctaaaaagatgttactatagacctgactagacaatgctatcttataaatgttaaatttgctgattagtaactataattatgattatgtggagaaattctaaaaagatacagtaggatcctcatttggttctagaatatacatatgcaaaaaaaaaaattttttttttttaagaatacacctgtacataaagaaaaaaggccgggaaaacctaatgatgtttgatctctatttcaaccatcttgggatttttttttttaagagagtgtctcactacattgcccaggctggacttgaattcctgggctcaagcaatcctcctgtctcagcctcccaaagtgttaggagttcagagccaccacacccagcccaaggttactgaaattggagtaatcaaatattgtaatatttggttaatattgaatattaataatgtcattttattttattactatttttatatttctatttatcaaatatttcaatttgttatagaatatttcaataaattcaagtagtgaaaaagtttttacaattgccatacttttaccagtttaaacacacaggcacataaaatgctcaacaggtaacttaaaaatgtctccctcatataaatcagtcatacagagaatttcatgtatgtacgtatatacatgtagctgtctaatatttagcaggctttgaatatgctgatttgtaaaaacaaactgccaaaacaagcagatcaatttctggctaagccgcataacccaaatactctaaacaaattatcaagcatgtatcaaggtacatctcacttcacttaccatattaaaataatgtttcatcttggtaccttttgtaatatcccatataaatatgctgccatcatgtcctgcagataacataattctggaatcaaagggatgtgtctccagaacaaatacttcatcagcatgtccctttatttaacaaagtcataacattaaggagggtttacaagttacaaattgaaaatttaaaaatacatactgttacagcatatacttttagaaatgtattcgacaataatttataattataaaaatttctaatcatttcatagtttacatgagagaaacaacttgttcaatatattatttttatagcttcaaaattacaatcatatttcaaaaaatctcatttgttacactgtaccagaaattacctaccattaagttatgaagcagttgtccagtgtaagaattccacactttgaggacatgatcattcacagctgtgacaacaatgctatcattttgattccaagctatcattgttactttaggtttcataaacctttcctcttcggaagataagtccctaacaaaaaaatacacaacatgtaaacttatttagatggctggctatacaatgtatacaatctctcatcaatacaaaaataaagaaatccaacccatgtgcctatcttatcaaccctacagtgagttcatcacagctgacccagaacagactgtctagaaacaggtgagggcaaaacctgaagaagggagggataatttagaaacagtacagagactgaataagggcagattttaggacaccattactgcttatgaaagcaatgctttttctccctacttctttcctattatttccttcttctgaatacaaacctattgctaacacttactttcaactgtttctctccatagaagacaaaaaaattttaggaacacaaaaataaggtaattcatattcatatccccaatgtttagaaaaataactgacacacagatgttcaatctgaactgtaaatgggactattctcatctcttcatacaactttcctacagtctactcctacaggccccttggcaagaacggtcttggatacacatgcctagaatgtttttcatcctttataaaagtgttatggagggccagacacggtggctcacgcctgtaatcccagcatcttgggagaccgaggcaggcagatcacgaggtcagcggtttgagactagcctggccaacatggtgaaaccccgtctctactaaaaatacaacattagccaggtgtggtggcacacacctgtattcccagctactcagaaggctgaggcaggagaatcattggaacctgggagacagagtctgcagtgaaccaagaccgcaccattgcactccagcctgggtgacagagcaagactacgttctcaaaaaataaaaaagtgatatgcaaagggtctctgcattacagtagtcaacagtggggtagggaaggcctaatggttctgaaataatagaatacgttttaagaaattacaagcatcggccgggcacggtggctcatgcctgtaatcccagcattttgagaggccgaggcaggcggataacgaggtcaggagattgagaccatcctggctaacacggtgaaacctcgtctctactaaaaatacaaaaaaaagcaaaattagccaggcgtggtggtgggcacctgtagtccctactactcgggaggctgaggtgggaggatagcatgaacccaggaggcggaacttacagtgagccaagatcgcaccactgcactccagcctgggcaacagagcaagactccgtctcaaaaaaaaaaaaaaaaaaaaaaagatattacaagcatctaacatgttttaattaacaaaggctgggcatggtagctcacacctataatcccagcacttttgagaggccaaggtgggcggatcacttgaggtcaggagttccagaccaacctggccaacaggatgaaatcatgcctctataaaaaatacaaaaattagctgggcgtagtgacaggctcctgtaatcccagctacttgggaggctgaggaaggagaatcacttgaacccaggaggcgaaggttgcaatgagctgagaccgtgccactccatttcaaaaaaaaaaaaaaaaagaatatagaatgagtgttataaaacagctatctatgtaattacaaaaaaaaaacacacagaagagagaataattctaactagattgattggtgttgagggtagaataatattaagaagtaaaatggaggccgggcgcggtggctcacgcctgtaatcccagatctttgggagggcgacgcgggtggatcacgaggtcaggagatcaagaccatcctggttgcacatgtatacatatgtaactaacctgcacattgtgcacatgtaccctaaaacttaaataaataaaaaaaaaaaaaaagaccatcctggctaacatggtgaaaccccgtctctactaaaaatacaaaaaaaattagccgggcatgtggcgggcgcctgtagtctcagctactcgtgaggctgaggcaggagaacggcatgaacccaggaggcagggcttgcagtgagcagagatcgcaccactgcactccagcctgggcgacagagcaagactctgtctccaaaaaaaaaagtaaaatggaataaaggcaaagactccattcttcactttaaactaaaaggcttttgaagtaataacattgctttttttttttttttttgaggtggagtctagctctgtcgcccaggctggggtgtagtggctccatctaggctcactgaaacctctatctcctgggttcaactgattctcctgctttagcctcccgagtagctgggattacaggcgcatgccaccatatccggctaatttttctatttttttttagtagaggcagggtttcaccatgttggccaggctagtctcgatatcctgacctcaggtgatccacctgccttggcctcccaaagtgctgggaatacaggcatgagccactatgcccagccacaaattaataactttgaatttactaacagatatgttccatttcatcaagttgattcgccaatattagaacactaaaataaacagatcaatcaattcttacatacagaagactctgtttttcaagatttgaaagcaagaaaacttaaaatgagaagatattttctcatgaagaaaattataggaaaagtccccttcatggatcgagtgcgtcagcaagaaaactaaacagttttcagtctcatttaaaaattttcattcaagttttgacagtttctattttccttaataaaacaataataggtgaaactgactttaaattatcttcacccccattccctttatttcaactaatcaaggattgacagtattcactttcatactgagatgtaacatttttatatataataaagattttttaatttgtttatgagcaagggttatcaaatttccagtatatatacttttcattctctatcacagataattccacaaaaaaacaagatcaaatttattttgaaaatgcaatacaattctttgagctacagcagagaatataagtcaatttctgttgttaaaaacaaagcatttgggaggcagaggcaagaggatcacttgagcccaagagttcaagatgagcctgaacaaaagtctttacaaaaaataaacataaaaattagccaggcatggtggctcatgctcatagtcccagctacttggaaggctgagatggggggacaggctgagatggggggactgcctgaggccggaatgtcaaggctgaagtgagtcacgatcataccactggcgctccagcctgggcgatggagtgagaccctaaaccattttttttaaataaaaataaagcagacatgatttccagaagacaaaatgtggaaacgtttctcagaaaaactgatatgaaaaagtgcaaagttaaaatcaggaaacaaactctaaagtaaaatctatgacttttatttttagagagtctcgctctgtcacccaggctggagctcaattttcttttttaaccttaataataaagtatgtttgcttaccctatttcccagccttggctctaagctacttttaaattttttcaaaaatcctatccacagaaaagtataatttccactcttaacgtacttgagttaattttatcttttttacttgtagaagcttttaaatgcaacatctaagaaggaggtcaatgctttgaaccatagaaaaagtacatgttattctttgctatacaacgtaaggataaatttacctggatgtctctgttcacctgatatgcagtacgcagctattcacttataccacagctcttcgtaatagaaggtagctataatcccctcaacaaaataaccactgagagacacagagagcgagagagagagagagagagagacagatcgaacacctatgatgcacctacttctaacaatctcaacttaccctgagattctggtagccatatccaataaaatgctcctccattctaactgctcaaatctccaaatccgtgctgttccatctctgctaccacttaggaaccttaaaacattcagaacaggatcttactatattcacacactttccaacaagggctacaattaaaatcacatgcaaaaaaagaatgtaatgaagctgtcctaacaacaggacaatccacaggtgttaattcaaaagacaaggtatttagagcgtatctggatgggaaaaaaaatttggtttgctatgatttgcccggccctatgaaataaaacacacctcaaactcaatcaatagcttttcaaacagattaagttttgaaaatacaatgtataagaatgctgagaagaggcaacctgcagtggctcatgtctgtaatcccagcactttgggaggccaaggtgggtggatcacaaggtcaggagttcgagatcagtctgaccaacatggtgaaaccccgtctctactaaaaatacaaaaattagccaggcgtggtggcacatgcctgtaatcgcagctactcaggaggctaagacaggagaatcgcttgaacccaggagggggaggttgcagtgcagtgagccgaggctgcaccactgcactccagcctaggcaacagagctagactccgtctcaaaaaaaaataattaaataagaatgccaagaagaaaaaaaaaacagaaaaaagttttgaagtataggaaaataagagcaatagctccattttaaacatcttacttgttaattcaaattaattcatgttggacactgtgtaaaaataaatcaatctattaacaaattaagttctcaacaattagtttagcaaagggacctgacacacaatggaggcaaagaaggagtatatgatttaagtaataatttctttgcaggatatatcacggtggtttcttagaaaagttttttttaactacccaaacaagaaatttaatgatccttacacataattttttcagtaaatcagacatctagccaaagaaaaactacttttggtcgctagaagctggcagaaactacaattctaaaaacttacatttcatgtgttcttcccccaacccctgccctagacacttttcattcaattaatacatttactaataaatacctgcaatatacaaagtgacagttaattatatattatttcaaaatttctgagtagatttcagatgttctgactacagaaaaatgctcagtatgtgaagtggcagagatgtttattggcttgatttaatcatcccacaatgtaaatatatattaaaacaccacagtgtacttactccataaacatagacaattattagtcaactaaaaataaaaaataatggctgagcaaggtggctcacgcctgtaatcccagcactttaggagggcgaggcaggcagatcacctgaagtcgggagttcgagaccagactgaccaacatggaggaaccccgtctctactaaaaatacaaagttagccgggcacagtggcaggcgcctgtaatcccagctactcaggaggctgaggtagaagattaacttgaacccaagaggtggaggttgcagtgagccgagattgtgccactgcactccagcctgggcaacgagagcgaaactccatctcaaaaaataaataaataaataaataatcataataatataaagggaaaaaatacatacaaaatgacaggttagctatactaacatgtagcacattatatttgcctaataacacacacacacacatacaaaacacacacttaccgatcaccattgttacaaaattggatactatctactttatcctaaaggggggaaaaggacaaatacaaaaatgatcatctacatggtctgtgaatttgaaaaaatgaagttttaatgctagaagcctatttgctttaacaagcaaaatttgcacttgtgttgcttagccctgtcattcaacatgttttataattttaagtgaagactaactacaaacctaagactactaaaatacagctttcatttcaaagaaaggcacatctaacaggaaaaaaagccttgcttctaaacttaaagcagtatttataattacatctgtttaagatgacttatatggaagtgaaatgtgtggaaagtgctcaaaatataggctttaaagtagctaaaaataaggcattttcaattgttgttttaagttatttaaatctgtatctatcaaataacctctggatgtggactgccttcccaaaagcttcaaataaaagaaaagatggcccaaccctgaccagtacttcagaacactgacagttttctatcttactatgcattattaaaatcacattcttatttcatgggcttggttagataaacaggctcacttaaagttaacccacccagatcaactgtcataatcaagattttgaacataaagctaaaataaccactgtaaaatattaggcctctcaagtgctaatctgagttgccagtgacatacctcccctttaaatataattgcttgtatgcttaaattaaaattagaatagaattaacaaaaactatattgtacctagacattttcatttttataaatatacaaacatctctaacaatattttaactgtcaaatagaattcagcaaaaatttaagataacattcacaagcaatgacttatctcagaaatgcaactatgatttaatattttaaaacttaataccatcaaaaagttataaatgacagttcatttgttcaacagaaaaaaaattaaaaataaaagtagagccaataacaatgccccttagcaataacaggaatagtattaacaattaatctaaaggattttaaaacgtggatgcttacagtgtggctttcaagttctgcgattttttcgggtgcttcaaaacccaaaaaatacattctgattacatgatcagtactacctgtggctaaaaacataccacctgaaataaaaatggtaaggtttaaacatccagtttataacaaatacctgaacaaatcaaatttccatattaaaatataaaaaagaaagatcatttaccctaaaactaagtttatctcaacagttacattttctgactcactatatagaggttataaagctgaacttgtagctttaaaaaacaaaattaattcaatctggaaacattcacaatctcctcctgttttttttgagacagaatctcactctgtcgcccagtctggagcccaatggtgtgatctcggctcactgcaacttctacctcccaggttcaagtaattctactgcctcagcctgctgagtagctgggattacaggagcacaccagcatgcccagctaattttttgtatttttagtagagatgggggtctcaccatgttggtcaggatggtctcgaactcctgacctcaggtgatccacccgcctcagcctcctaaagtgttgggattacaggcgtgagccagctggtggggcggggaacatggtctcagtctgtcgcccaggctggagtgcagtggtgtgaccatggctcactgcagcctcaacctcctggacacaagcaatactcccacctagtctcctgagtagctgggactacaggtgtgcaccatgcccagataatttttgttttgtttttttttagagatgggttctccctatgttgccagggctgggctcgaattcctgggctgaagcaatcctcccatctcggcctcccaaaggactgggattacaggcattgagtcactgtgcctggcctccccatctgtattattaagggtggcaatataatgccaattaagcaccagcgctctaaaaatatttttaagaaaagaagttctgctttctaaacaattctacatacctaaccctagcttgttcaagttttcagattttatgagggaaaagtctttgacctatccgaaaaaagagaaaggttaccacacaagttcactgtacaaaaactgaaaaagaataatttcatcaagatattatgtgtgggaaataaatttaaactatcaaacatacacagtttagcctattcaaagaaaatcacaaatttagattatcatacacatagtactggcataggaatcacttgtgtggacacctcaagcctcccttttaccagccatctcttatatcactgattactaccagaaatcagagaaaggcagactggaggactggaagaacaaggctaacaaaataaacatcataaattgaacctaatgaaataaacaccagaagtcatttaccatgtagctaataaaagttcttagcaaccaagtggtcatttaatagatgtttaaaaaaaaaaaactaagaaaaaaatgtgaagaagttcttaccaacactaaaagaagaacaaagcatttgaacgcctggcctaggcttttcagtgaacttcaggggacgtgggctttaaaagaagaagatgctgctttaaaatagattattttaccacattaacacagcttaaaatattagttttaatctagcatatttaaatattataattttttaagagacagggtctcgccatgttgcccacactagacacaaactcttgggctcaagggaccctccagcctcagcctccctagtggctggggaccacaggcacacaacacccagctataatcttatttctataataccttattgtatatcaaatatttccacagatttccatgtatttttacaaaatataaaaagatcaaattaatcatatttcctttaacccaatacacccaaaatatcaacatgtaatccaaatcaataaaattataagatactttcatattaagtctttgaaattttccagtgtgtatttgagactcaaaatacatctcaatttgacaactcaatttttaacaaaaatattttatctatatttggatttcccaaaactcattgaaaatttcacatactcgttattcaagatatgcttaattttctaacaggccaggcgtggtggctcacgcctgtgatcccagtactttgggaggccaaggcgggtggatcacctgagatcaggagtttgagactagcctggccaacctggtgaaactccatctctactaaaaatacaaaaattagctggacgtggtggcgggcacctgtaatcccagctactcaggaggctgaggcaggagaatcacttgaacccaggaggcagaggctgcagtgagccgagatcacgccatcacactccagcctgggcaacagagtgagactccatctcaaaaaaaaaaaaaaaaaagaaaaaaaaaaagaaaacgaaaacaaaaggaaaaaaaatgttttaatacattaatcaattgtaagttttaaatttaaattatcaattcagttcctcaattgcactagccacatttaaagtgctcaacgatcatatatggctagtgactactgtattagacagcacaggtatacaatacaggtcttatgactctcaaatgttcctgcctgaatttccaattatatacctattattttaaatgccttactttgtctttgcaaaaatgtgctaagatagaaaagctatgcttcttttacaaatcctgctatctacataattataaataggaaatagtcaatatggcacatatgctgtatataataaaaattaagttcaaaggttaaaaaaaagcaacaatacacaatttctcataacaataaaacttcatttcattagattaaactgtaactacattaaaaaacaaaacctgttacataattaaagccacttacctaaattttaaggattctaaatcccattgccaaaagcaaactgtcccatcagcaccagtggaaaccatgtatctttgagagcctttggccatcgggctaaactaaaaagtaaaacatatacaattcagtttccagaacttctacttaagttacagtttaatagtcttgcaaacttaacttcaattgacagtttcaggaaataaacacatgaaatccaaaatataggtaatactaccgtagtgaaaaaatcataacctctccacattcatttatatgtaatatgatctcaataagcctattttcagaatgaacaagactggccagaaaaactttaacaaggtggagatctagtcctactagatattaaagcatatcacagagtgttaataattaaaatgatcagacaaaacagggtacactgatagaatgaccaatggaaaaaatacaatccaaaactagaccctattcaacctgggaaagctgactgaaaaactggaaggaaaaatgggagaaaacatgaatcctaatctaagacttaagtacaattaaggtattatctcaaatctgttgggcgaacaatggatcactgcataaatggtattacaattgtgcagtaatctggaaaaaaactaagtccattcttcagactacatcaggatacattcgaaatgggtcaatgatttaaatattttgaaaacaaagccataaaataaggaaacacaggaactatactgcagcgcaacttcagaataaggctaacatctgtacttaataaaataccaaaagtgctaaacaagcaagctacagaaaggaagatgaactagctagagacatctaggaaggattaaatagtaggaaaatgcaaggaaaacaaacacacactaagcaaaggaataatatcagcacaagttcaaaagcgagggggaatatggtatatgatagaaacaaagatctatatgaacaaagtgttcatttctcaaagtcatgcggcaatggggtaaatgaatagagaatctggatgtaatcaaagcagcttaaagggtaactgtacttttcaagtaaaaacaccagaagcagccaaacgatttgtcttacagcaatatacagtattgattgaaaaagaagaggcaagatgtaataaaaagccaagagggaacccagttaatctaagaagcaagaagcttaactggaatacagctccacccttctccccctagaatggggaggaaagaccaaaagagaggagcatcaaaacttgctgactcgcccgagtgctgtggctcatgcctgtaatcccagcgctttgtggggccgaggagtgagaattgcttgagtccaagagttcaagaccagcctaggtgacatggcgaaaccctgtctctacaaaaaaatacaaaattgtccaggcgtgatgacacacggctgtgatcccagtactatgggaggccaaggcaggcagatcacttgaggtcagaagtttgaggccagcctggccaacatggtgaaacaccacctctactaaaaatacaaaaattagccgggcatgatgttggatgcctgtaacataaaaagtaggcaggagtggtggcggatgcccataatcccagctactcaggaggctgaggcaggagaatcgcttgaatccgggaggcaaaggttgcagcaggctgagatggcgccactgcactccagccgggacaacacagcaagactccttcacctaccaaaaaaaatatatatatatatgtatgtatgtatacatgtatatatatacgtatacatacatatacatgtgtatatatgtagacatatatgtatacatataaatacatgtatataaatatgtatatatacacatatgtcaacatatacgtctatgtataagtatatgtatgtacatatgtatatatacacgtatacgtatatatggacatatacacatacgtatataaacatatatataaaataaaataaaaaattagccaggcatggtggcgcatgcttgtagtcccagctacccaggaggctgaggttgcaaagagccaagatcacaccactgcatttcagcctgggcaacagagtgagactctgtctcaaaaagcaaacaaacttgctgactcaagaaacattcaagacaaagaaggagcttagaaaagaaagactaatagtgccattaacagaaagcaaagtaaggaagaaattatggattttttttaatgttgaaagtgattgtttatatctaagtagatatgttccagaatgtggcctaacattgagctttgcaggctatctcattaaaagtaatgagaaaaagtagtataattaaagttatattagtagttggatatttttgttaattaaaattgaagattcttttattcctttgctttcttaataaacttgctttcactttaaaaaaaatttaaacaccttccacactgaattgctaattggacaaaaaaatttttttttaattaaaacatcagagtaaaactcgcaaccttgcagagtactttgagaattctagaggccaagcacagttgctcatgcctgtaatcccagcactttggaaggccaaggcaggtggatcacctgaggtcaggagttcaagaccagcctgatcaacatggtgaaaccctgtctctactaaaaatacaaaaaattagccatgcatggtggtgggcgcctgtaatcccaactactcgggaggctgaggcaggagaatcgcttgaacctggaaggcagagatttcagtgagctgagatcgcaccactgtactccagcctgggcaacaagagcggaactccgtcacaaaaaaaaaaaaaaaaaggaattctaaacctaactgtccatgaaagaatatgtttaagtcacctgttctaaatcaaatttccagacagataagcaatttgtagctatttctgtcccacttatatcttcatctattcatggactgatatatactgttttctttataacagctctaaaacatttttatatctccagcatggctaaacaattctttgctcttctttcgctgtccgtgcttatataattctcttttaaatgagcttgattggctggcacagttccataaaaacaaaatcattggaatttcaaatgtaaatacgctgattttatagcataatcaggaaagatctgacatatttacaatactgaatcttctgattcaggaacatggtagaggtattttcacttacttagactatttccttccccaacccaagactccggtcagtatttttaagacctttcttcataaacatatttcacatttcctgttaaattcattcctatgtgtttgaggggttttgttgctattacaaattatactcttcttccattgtatttattacttctttattgctggtgtacaataaagttctggttttaagacatgggtcctatatatatttaaccatcgtattaagctctcagcagttctaacaagttttaacagaattcactaatgaagcctctaagcttgaagttttaagagttgcgatttgtttttgtttttttagtgtccaacaggtatttttaacttctgggggcttccttttactgtttctaaatagcaacatttcatcaattgcagtatcactgacatacaaccatgttttgttatgccccctcaaggccagtcgccaatgactataatatgtatttctggatattaaaaatagtcttgctttttttttctaagatggattagctaaatcctgcataaaagaaacagtatgaactatgatttctaaaagtcttctttggcctaggattttaggattccgtgctacaatctcatgtgtctacttccaaagtccaaagtatgcttgaaatctacacattttgagtgactacctagtatttaccacaggctcatgagcttaagaacgtctacttttacaacttgttcagtggtaaaataagcactctttaatatatgctgatcctctcttttgctatgaaagaatgtattatttattttctttggatatatagccaatctttttttgtgaagaacctccagctgggtagggtggctcatgcttataaagcccagtgctttgggaggccaatggaggaggattgcttgaggccagaagttcaagaccagcttgtgaaacatagcaagacactgtctctacaaaaaattaagaactaactagatgacgtggcacacacctatagtcccagctactcagaaggctgaggcaggaggatgacttgagctcataagtttgaggccaagcgagctatgattacaccactgcactccagcctgggcaacagagagagaacctgcctctgggggaggcgggagaacctccatactgtttcccataatagttgtactaatttacattctcaccaaaagtgcataagagttcccctttctccacatccttcccaacatttgttatcctttgtctttttgagaacagccattctgactggggtgaggtagtatctcactgtggttttgatttgcattttcctgataattagtgatgttaagcatattttcatatatctgtcagccatttgtatgtgttctttttagaaatgtctacgcaggtcttttgcccattttttaactgaattttttttctattgagttgagttccttatatgttctggatattaactctttgtcagatgcataaagtttacaagtactttctcctattcttcaggttgtctcttcgatctatattgtttgtttcctttgctgtgcagaagctttgtagtttgatgtaatcccatttgtctgtttttgcttttgttccctatgcttttgggtgtatatccaaagggaaatgaaatcagtatattgaagagataattgcactcccatgtttactgcagtgccattcacaatagtcaagacatgaatcaacctaaacacccatctacagatgaatgaacaaagaaaatgccgtgtgtccgtgtatacacacacacaaaatggaacattataaacagaatattcttccgtcgtttgtggtaatatggatgaacctaaaggccattatgttaagtgaaatagcaaggcacagaaaggcaaacactgtgtaatttcacccttgaattttaaaagttgatttcacagaagcagagaatagaacagtggttacctatggctggggagtatgggggaagggggggaccatgagaagttgtttcaatgggtattaagttacaatcagacaggaagaataagttctggtgttccattacacagtaaggtgagtacagcaaataacaatgtgatagacatttcaagacagctagaagagaagattttgaatattaccacaacaaataaatgataaatgcttagtgatggatataattaccctcatttgatccttatacaatgcatatatgcactgaaacatcacactgtattctttgtctttctacaagtattataggtcaactaaaaacaaaaaatttaaaaagaatgtaggctaggtgtggtggctcacacacataatcccagcactttgggaggccaaggcaggaggactgctcgagcctaggagtgtgaccagttcaggcaacatggcaaaaccccatctctactcaaaaaacacacacaaaaaaacttagccaggtgtggtgacacacacctgtagtcccagctactcccagctactcaggagggtgaggggggagcatcacttgagcccagtcaacaaaaaaaaaaaaaaaaaaaaaagaatgtattcgtcaaaggtagttagctgtcctgaactgttaaaatgaaatctcttcctgtatgctcactcatgcatcctaggggagataaaaattcacataacataaaactcaccatatgaactttttttttttttttgagtcaagagtctcgctctgtcgcccaggctagagtgcagtggtgcgatctcggctcactgcaagctccgtctcccaggttcacgccattctcctgcctcggtctcccgagtagctgggactacaggcgctggccaccatgctcggctaatgttgtttttatattattagtagagatggggtttcaccatgttagccaggatggtctccatctgctgacctcgtgatctgcccgcctcggcctcccaaagtgctgggattacaggcgtaagccaccgcgcccggcccatatgaaccattttaaagtcaacaattcagtggcatttagtacatgcacaatgctgtgcagccatcgccactacctaaggtcaatagctactatttcacaagataaactgcaacctgtcaaggcatttttcaattctcttggattttaagtaggcaaccaaacttctggaaaataaaagttttttatttccagtatttgtacttttttttttttgagacagagtctcacactgtcacctggtgggaagtgcagtggcgcaatctctgctcactgcaacctccacctcccggcttcaagcgattctcctgcctcagcctcccaagtagctgggattacaggtgcccgccaccatgcccggctaattttttgtatttttaatacagacagggtttcattatgttggtcaggctggtctgaaactcctgacctcgtgatccgcccacctcggcctcccaaagtgctaggattgcagacgtgagccactgcgcccggcccatttttgttcttgcctagcaatactaaaaatgaacagttgtagtaatagtatagtgttcattttctgcaaatacttaattttgtaatatttttaatctagataaaagtcgtaatagtaccatgagcacccatacactggtcatcaagattcaccaatggttaatagtttgcaacacttgcttcctgatgtagatatcacactgacatgaaccatccaaatctaccttgctgacatcatcacttcaaccctaaaatccttagtgtgtatctcctaacaatgacattctcctacataactatgattatcaatacttcgaaaacttactattgataaaacattattatataatccatattcaaattttccaaatttctcaagcatcctttacagcttttttctctcctaaatctagaacccaaatcaaggctcacacattacactaacgtttgtcccttttcctgaggttccttattgaaaagctctccacctttctatctttcttgaaaccaaacttttgaggaataagagatttgtttcacagactgtttctcaatttggatttgtctgattgcttccttgggagattagcgccaaacattttttacctaaataataagtaggtagagaaaatgtttaactacagatacaatgcatttcatagttacaagtcaattcagattttctttttgtgtcttgtttttctctgtattaaccttcaattttcctttataaagctgcttaaaatatcctctttttattatctgaaggatatgtagtgatacccctttttcaaatctgataatggttatttgtcacgtttcttttttgttccctgaacaatgtgttttttaccagtatttttagtctttcaaagaacttctggctttgttgatcctcactaccgttatgcacattttttctatccttaatttctgtacttatcttcataatttctttcttcttgtttgttcttctcctaacttcttgagaaatacacttgtgatcactgaatttcagcttctttctaatacatgaattgggtgtaaatttccccttcagcacaacttcagaagagaattatatactgctatgaaacaacttaccccaaaatttttagctgcactggacaacaataaatattcattatctcatagtctctatggtccaagaattcaacagcagcttagctagataggtctggctcagtgtctcaaggctgagagatgcagtcaagatgtcgacctgagccacagtcacataaaggcttaactgggaatagggggatctgcttccaaaatggcttattcacatggctatagcagaagacatcagttattaccatgaagacctttccatagggcagtttgagtgtgcaatctacctaacaactggcttcccccaagaccagtgattaaagagaataagacaaaagatatttcattatgttgtagtgtaacttcagaaacactgaaagtcacattataccattttctcaatatcttcaagttcacaggtcaaccctattcagcaaggagactacagtggcctaagtgccagaaggcaagaatcactgggcactgccttgaaggctggctcccaaagagtacctcccccaagttttaatatgtaatgttttcattattaatcagtttgaaatattcttaaatgtctattgtgatttttcttctttgatgtatggattatttagaagtacagttagttgacccttgaacaacgcaggggttagggtaccaaacccccccaggcagttgaaaatccacacgtaacttctgactcccaaaaaacttaactattgataaagcctcaccaattgcatgaacagtcaattaacacatatttttgtatatgttttatataatgtattcttataataaagctagagaaaagaaaatgttatcaagaaaatcgtaaggaagagaaaatatatttactattaagtagaagtgatcatcttaaaggtcttcatcctcattgtcttcatgttgaataggctgaagaggaggaggaggaataagaggagttggtcttgctatctcaggggtgacagaggtggaagaaaatctatatataagtcgacccatgcaattcaaacccatattgttcaagggtcaactatacataaaatttacaaaaagtgaggattatctgttattaattctggctgttagtaatttctggcttaattacactgttgtcagagaatatacttagaattatttcagttgagacttgctttagaccatttaatgtacttgcaagtaatataattatgtttacattgacatttactatcccagtatcatcttagtactgtttttttctcctttcttgttttactttctttattagtacatatttccccacctctattaagcctagtagttatgcaatctcttgctatacttttggctgttattctagagatttcaaaatgcatcttcatcttaaagtctaatgtaaatttgtattattttccacttcttgaacaatgcaaagatctcagaatactgaagttaccgcctcctgatacacacactattcattctttaattccatatgtattttgaagcccagaatttacttatcttatacagccaatgtttatttccatttacccacacattcatttttttttttgtcttaagtcttcattccttcttgcatctccaagtttccacctgggatcacatccccacctaaagaatattatttagaattccctttaatgttgttccattgctaagaagttctcagcttgtctaaatatgcatttaatatactttcattcttcaatgatatattttaataggttcagaattattgactggcattttctattagcaatttaaaaatattacttctttgtctatcaacttccgttacttctattaagaagctagcaatcaggccgggcacggtggctcacgcctgtaatcccagcactttgcgaggccgaggcgggcggatcatgaggtcaggagatcgagaccatcttggctaacacggtgaaacctcgtctctactaaaaaatacaaaaaattagccggacgtggtggcagccgcctgtagtcccagctacttgggaggctgaggcaggagaatggcgtgaacccgggagccagagcttgcagtgagccgagatcgcgccactgcactccagcctgggtgacagagtgagactccatctcaaaaaaaaaaaaaaagaagctagcaatcagtcttcttattagtcctctaatttttccctagggctgcaatgattactcattgtactccattctatctattttcttctggcctcaattccacttcactaattctctcttcagtttcatcagttgtgttcagatgctgttaaaatcacccactgaggttgggcgaggtggctcacacctgtaatcccagcactttgggaggccaaggcaggtggatcacgaggtcaggagatcgagacaatcctggctaacacagtgaaaccccatctctactaaaaatacaaaaaattagccgggcgtggtggcacgtgcctgtagccccagctactcgggaggctgaggcgcagaagaaccacttgaacccatgaggcagagattgcagtgagctgagattgcgccactgcactccagcctgggcaacagagcaagactccgtctcaaaaaaaaaaaaaaaaaatgtactactacccaattagattgttcagatatattcagtaggtgataaacgcatgtgagcccccgttacaagaagaatcatttcagggaagactagaactccactttcaaagaattccaagatgattttaaaacaggcactctctcaaagtataaattttcttatttgctgctatattgtcaacacattcatatcaaactataaaatgttaactgtgaaacctagcaagaatttgaattaattttcaaactataaaatcttccagagaacaatatacttaactaaaagtaagtacacaaaccaaaaatcttgcttaaacttccaaaataaaacactatctcagcaaggcacggtggctcaggcttataattccagcactttgggaggtggaggaagaaggactgcttgatcctaggaattcaagaacagcctggacaacatggctagattccatccctataaagaatttaaaaagccggggttggtaagcacacacctgtggccctagctactcgagaggttgagatgggcagaccttgaccccaggctgaggttacagtgagccatgactgcaccacagcactccgcctgggccaaaaacaaaaaacaaaaacaaaaaccgctatctcagttataactatcttcatcccaaaatagctactcactctcttttctttgagaatactgactagaacaaaagtcaccttttatcataaaatttcacaccaaatctatttaagtgaccagtaatacacagcctaggtgaatgtgcataaaaaaattgaaccaccaccagttttcaccaaattctaatgagagataccaatgtacctttaaaagccttataaatcaaacataaaataaaagccttacaaatcatctaacaatttacttcagtctaaccaaacgttaagtttcaaaacatgatagaaaagcactgaaacagggtagtagggacagcacttggcccaaccccaccaacatgtttttccatatgtgaccactgaccaccagacattttggtaccacccccactggcctatactcgctgaccagaccttgtaagttgtctaaaaaaactaaaacaagcagcattccaccatgaatcctactaaggagagttaactctatccgcccatatgtgcacaaggccaggagaaggaccaatcctaaccctgagcctcattgtaatactaaaaccttcgcccagaggggcttatctgcccctctcatcacgtgacatatgtgtcagcatgattccttagtgcatctgcacaccctgtgctccatcccacacatgtaataacgttcacctacctgatgagttatgcacattaccctccttaagacacggcaaggcattcccctggggagccagccagagaacccttcttccttcactgtctcacttattcccaatgtttcaggcataagtctctttttttatttttattttttgaggcagtctcactttgtcacccaggctggaatgcactggtgcgataacggctcactgcagcctcaacctcctggctcaagcaatcctccctcaacctcaggagtaccgagactacaggcgtgtgctaccttgccaaactattttttgtggggggtgggtgggggtgggggggggggtctcactaagttgcccaggccgggtctcaaacctgtgagctcaagtgatcctcccacctcagcctccctaaagtgctgggattataggcatgagccatcgctaggcacaagtcttaataaatctcagcataagtcttaataaatcttgtctgggaagtctgcctagcctcctattaatttctgttacactgacagccaagaaccgtgcactagtaagagtaacattttctgtccctaataactaacggatgtaaggcaatgatcatcagtgagtaatacaaaaaacactagacattttgtgccttctgatggaagaacttacatcccaagatgatcaattctctatcagtgatgaaatactcataccctcgccccagacgttttgaaatcagaaactttgggagtagtgcctaacaatgttttaatcaagccctccaggtgattctcatgcacattaaagagaaccactgctctacatccaataaccaacttaacagaaatacagaggaacatattaaactactccaacaggatacaatgggcaacatccaaactgtggggaaactatagataacctaggtccttcaacgaagaaactgcaagcgaattttttttaaactgcatagataggtgaaatttatattttaagtttcttttattctacagcaaccaattgtaacatgcaggcttcgttttgctcctgattcaaacaacctaaataaaataccattatgagacaactggaaacttgaacatcaataaatagtgtgataatggtgttgcagtttttttaaaaaggaatcttttccttccatcataaccgtcactatgaaaaaaagtggggaggggaatccttatcttttagaaatacagaatgaaatatttgcagaagaaattatataaaacctaggattcgctttaggtacaagatgaagcagttaggaaagaattggccatgggttgacagatacataggggtttatacaattctgtctactctgtataggttcaaaattatcctctgcttattgtgaaaaaaactttaaatattttggtaaattaaatcaactaagcggcacggtggctcacgcctgtaatcccagcactttgggaggctgagccgggcaggttacttggtcaggagttcgagaccagcctgcccaacatggtgaaaccctgtctctactaaaaatacaaaaattagccgggtgtggtggtggacacctgtaattctagctactcgggaggctgaggcacaagaatcgcttgaacccaggaggcagaggttgcagcgagctgagatcacaccactgcactccagcctgggcaacagaacaagactcagtctcaaaaaaaaaaaaaaatcaacttagcaaaatccacaagttttaaagttgaaaaataattaatctatcaccagtttctaattgacactcatccagttcaaccataaaccccaaaatatcaataagccttcatgtaaatatgcattagatcttcatttcatcagccttccatgatttgtatgatttgtatgaatgattatcacttctcttacttaaaacataactaatacacatcttactatttctcaattccaaagaaactgttttaaagaaaaaggtgaaaatacatataggaatgtgcccactaagctacaagtttacctgtaaagatgtaattgatcctgtgtgtccttggagcacagcaactggggcacaagttctcaagcaccacactctaataattttatcacagctccccgcagcaatcattgtattctcatagtttactgccatatctgaaatttctgcagaatgacctcttaatgtagataacaagcggccattatgtgttgaccaaatctttaccaaacagtcatctgaaccctaagaaaaaatatatccaaaaattaatgttagtacagcaaatcttttaaatattaaaagaataccttttatatgccatccaaattaactttaactctttccaactatagaatactctcttatttatgtaataaattatgactatggtcagaacacctatggaataatagtatttttctttaaggcaaagacagtctacataaagatactgccgagttatcatttctacgggtcagactccattaccaatactattttcccccaagttctctgcaaagtagtaagtccaactcaaagttcacggctctcttatatcaactaacaatggttaaatgttagtctaggccaggcacagtggctcacgcctgtaatcccaacactttgggaggcccaggtgggcggatcacaaggtcaggagatcgagaccatcctggctaaggcagtgaaacctttctactaaaaaatacaaaaaattagccgggcgtggtggctggcacctgtagtcccaactactgaagaggctgaggcaggagaattgtgtgaacccaggagacagagcttgcagtgagcggagattgcgccactgcactccagcctaggtgacagagtgagactccgtctcaaaaaaaaaaaaaaaaagtctattcacatcaagctatataatgtgatgaatgtgatgaatgttggaacagatctatacttcatagtgtgagaaacaggactaagtggcaatcccaaaaacaaacaaaagtggtgggaatagcctcctcacgaacacagtctcaagtttacagtactagccagcacccattcaagaaacatttgattatctactcttgaattttacacccacaaaatgaaagttaaacttctcacctctcctaacttacgcttaaaacattaaaatgataaattccaaattttttcagataggtttttaatacttacttgaacactaatgggttattttataatcaacccattttcctgaaccagtgattaatgtgaacatgaatcacttgtagaggtctgaggagctttttattttggggggtttacagttaatacatatatttaattacaatgtaatctaattcagtaagtctagaatgtgctagagggaaagtgttaggtatgtctatgtttttttttttttttttttttttttttttgagacggaatctcgctctgtcgcccaggctggagagcagtggggcgatttctgcacactgcaagctccacctcccaggttcacgccattctcctacctcagcctcccgagtagctgggactacaggcgcccaccaccacacccggctaatttttctgtatttttagtagagatggggtttcaccgtgttagccaggatggtctcgatctcctgacctcgtgatccgcctgtctcggccgcccaaagtgctgggattacaggcgtgagccaccgcgcccggccaggtatgtctatttttaagcatccttaaatatcacatttaagaacgactactctaaatcactgtctttcaaaacagcacagagtcctatcttcagctgaagcacttattaaaaatacaaattcgtgagacccacaccatacctactgagtcaaaatctctgaggatgggaaacagaaactaagatttcctagatgattctgaagcacactaaagtactctagatgacatcaaatcaagtttaaaatttttactcactgtaaagattctatgtcctgtcctatcaaatgctacacagtaaacagcagatagatgtccgagaatccttctgtgcatttttatatgctgatacatagttcctggaaatgctgtactaaaagtggaacaccctgtgagttgttttcctcgatgtatctccactaggaaataaaaacaatgaaaatggttaagggagagccaataaggaaaaatctaagaaaaactcaaataacaatttctagagggtcacaaaaatctatgttcaagaagccctaatgacacaatttcttcccaattctattcttctgtattcagtaacatagacttcttactataaaaagattttttattaattttatttttagtaattattttaacaataatttgacatttgatacttattactattaaaacaacatttcaaccagtatttccttttaaattttaatacagcatttataaaggttgttgagaaatttaaaaacaattatttcaggcatctcaaaggccaaccttacttaccaagatttggtggggaaccataattcactggcatttcaggaggtcttcctctatgaagagcagcaaaggcagagcccttccaaactgtgtgcctgcagtctttaaaatgaattttagatacacataaaatcttgaaagttaaccccaagaaagattttatagaatacttacgtatattgtaataaactgtttattcaacattttaccaactagtatactttaacagaaaagccctggaggtttattagactatttctgaagaaaaagaaaattaagacatctcagatacagcagcaacaacaactaacatttgtgtagcactttacaattcacaaagtgctttcaacatacattagctcattgaatcctcacaacaaccctgtgaggtaggtatttttgccaatttacaagtgaggtaactgaggctcaaaggttccaggacctttaaagagatccacagcaaatgattggtaaaagatggaccataaaaccagatcttttgactccaagtcccatttaatgccaagtgtttatttttcaatgtagaattatatcatacaatactaaagatgaaaggtcttacaactgatccaacttttcaaaaatggaagcttttataaggaaaaagttctttgatttatatgaaaattcatgacttgttcagttttaaaattaatttggccaatactaccatgactttagtctctatctttaggaagtaccaataaattatatagctttcccttcattgtaggatcacagaaaatcctctactgaagagcacatacgtaggatctgtgactctgaacactaattcaaagtccatccctccttgacctaccagcaaatgcactaagaaaaaaaagtctgccctcctctataggagatagcagcagaacataggtttgaagcagtcacactgtgccagaaattagtttcttcataactcaaagaagaaagggaaggcatcatactaaacctctactgagcctcgggtgccccaaactaacagacatattgcattttacatgaatggattcattaccactatcatgaccaaagagcagttacaaggcatcctcctggggtaccagtacaaaacaaacagagaatacgcccctaccctagggcagcttgctgaagactcttctaaggtctggccagttctaaatcactgctcatcacaaaacaacgacatggagcttgacacaagtaaagaaaacaaaggaaaacaggctaccaattaactaccatataaccagctaaaatagaataattacaaagtgaatagggacacagaagaggaagaatataaacagtgtcctgattagtgccacagggtgacatggctagagcactaagaaacaactaaagctaacaaaccagtctggcacggaactaagagggaggggtgttctttctcagttaagctttatactggtggtgcagctaagagtagcatcacatcagcaatagctcgtaataaaaaataatcatgggatgaacttgatgtatactcagcatcagaagaaccaacaatctttgcccattagcagtttagccacatgtacacatatattatatcacatacatatacttagtctaagtcatatataccaagctaacagaaaaagaatagcaatttcaaacattttgctagcacataacttggcaaaaaaattaaattagtaaaaaaagaaccatgcagttttacatttgtggtgcttgttttcaagctgctaccaaatttagaaaatcacttccctttataacaaagggctttcagaagctaaatatcaaatgaaatacctctagcatttaaagagtttattagacacatacaattacattcaatgaagttatgagtgagctacaaaatggaaaattaagaactcacattgataaaacctcaaacaacatctcagaataaattcaagctttttagcttaacatctatatctttatcaactttttaatgcagaaggacccattaaacacttatgtaataaaattcaatgttctatgctaaatgcagagaattttatagtccacagcatgatttatagttacattatcacctttcttccacaatgcttacattacttcacaattataataattattaggctattaatacaaagcagaacacttcttcaaattaaggtaccttttgctgtacgtagcaaagactgccttcctgcaccaagtaaagaagtgactcttgaaatactgggtggaatttctttatccaacataggaccgatgcgctggcagatttgcaaaagatgatcaggagccacatgcttattggacaagacctagttggagagcaagttttaatgacaacagcttaataatatcaaaaactattaaatacttagggataagtctggcaaaatgtgaaaaacatacactgaaaactgtaaaacatgctgagagaaattaaagacgacttaaataaacaataagctgatctacagatttgagctacagattcaaacctgtaacactcaaaacttcagcaacatttttttttgtagaaattgacaattttgttctaaaatttatatgcaaatgacctggaaaagcacctctgaaaaagaaaaaaggttgcagagctaacaaaacttaatctcaagacttgaaatcaagactttactcaaaattgcactaactgggccagggatggtgactcacacctgtaatctcagcactttgtaaggccaaggcaggtggatcacttgagatcaggagttcgagaccagcctgaccaacatggtgaaaccccatctttactaaaaatacaaaattagccaggcatggtggtgcacacctgtagtcccagctacttgggaggctgaggcaggagaatcacttgaacccaggaggtggaggttgcagtgagctgggatcgtgccattgcactctagcctgggcaacaagaaaaaaatatatatacatattacgctaactcgcctgtctcaaaaaaaaaaaaatatatatatatgctaactggcctgtaagtgaagcatacatctttgagagagatgttaagatatcaaagatcctataagacatcatttagtatctaaatcatggataactggttctcaacaacatactaggcagtaaaaaacattaattctttcagtaagtactgacagcctattaggtgccaggagccataagtggatatacctatggattactatagacaaatatatgtctgttataattttaaatgaaaaataatcatttatttactccaacgtaagagataaaagatattgctctcatctcgacaatgagaataggctggataaactttaaaaaatgtataaacccatcacagctgaagaaacaaagaaaaatctacattaactaatcccacaaagtacaagcttttctgggaacagaaaagggactcaggctgggcacggtggctcacgcttgtaatcccaacactttgggaggccgaggcaggtggatcactagaggtcaagagctcgagaccagcctggcggaaatggtgacatcccatctctactaaaaaaaaaaaaacacaaaaattagctgggtgtggtggtaggcgcctgtaatcccagctacttaggaggctgaggtatgaaatcacttgaacctgggaggcggaggttgcagtgaaccaagatcatgctatagcactccacagcctgggcgacaagagtgaaactccatctaaaaaaaataaagttaaagaaaagggactcatagctgcttacacccctagcagagaggcaggaagaactgacctcagaaaagaataagaaaaaaccactcaaacctctaacaaacttaatggctacttgtggccggcatgactgattagaatcctaaggcgcctcagttacagtgagtctgcacacctaccacaattttttcccataggccttcaccaactgcatagggcccaaacactaaagccagggcagccctggaagaaatgcactgtagtggccctcctaaggctagagataggacaacagggtggagaatgatctcttctgacatggaaagcctagagcaggacggcaaggcagagcgaactctgtagcaacctaaaaagttggcagtcaggtacaaagtagaaaaagatctcacaaagtttggaaaggtggcaactccagtgtaaaaaataagacatctcagaaatttcatgagggccaaatgtcaaactctgctggaagggaaagtattgatgccaccctcaaagcatggaaagccagtgatttactgaatgtaacaaagctcagagatgatcaattacaaattagattgaccctgtctcacacactaactgcttgagaaaagagcacatctttaccagaggtaaatacattactgcagcctctactctttacacaaaaagttacagcatacctcaaaaaaatgatgagatacacaacaaagctagatatatgacccatggtcaagaggggaaatggtcaatagaagcagacctagagatggcccagatgttcaaaaatgcttagctgttatttcttcaaactacttctcccctctatcctttccacttgggactttaattacacattaaactatttgatatcataccacttattcaaaaagctcagagaacccaagaaaaataaatgcaaagaaaacccactttgggaggccaaggcgggcagattacgaggtcaggagatcgagaccatcctggctaacacggtaaaaccctgtctctactaaaaatacaaaaaaattagccaggcgtggtggcaggtgcctgtagtcccagctgctggggagactgaggcaggagaatggcgtgaacccaggaggcagagcttgcagtgagccaagatggcgccactgcactccagcctgggtgacagagcaaggctcccacaaaaaaaaaaaaaaaaggaaaccacctaggtgcacatgtgaaaggcagcttctgacatgcccgctaatagtgcccaaacctcttggtagtcagacttgtgaaatcccctcctcatttacttcagaaaacagtaacattgagaggatactacttctatgattaggttacaattgtgacttctgtcttgctaagactctactgcctcgtcagctttcatcttttgataactcaagctatcacactggaaagaccaaaagggcgaggaactgagagtggccaatagtcaggtagaaactgaggccctcagtcaaacaaccctccaggaaccgaatcctgccaaaactacatgagcttggaagcctattcctcccgtcaagccttcagctaaaaccccagttctgccaatattttgactgcaccttcagagaaaaggagacagggaacccatctgagctgtgtctggaccgctgacttacagaaactggcagataacaacaaattagtgtagttttaagctgctaaattttggggtaatttgttatacagcaatagatcatgactacaggacaacatagtaaaactgctgaaaatcaaagacaaaataaaaatcctaaaagcaaccagaccaaaaacaacattattttcaaaggagcaataagactgctaaatttccaacattaggaaggcataaggcagtagaacatctttactgtgccgaaaaaaaaaaaaaaaggactatgaatcagaattccatagctactgaagtcactgtcaacaaacctttgttaaaaagctttgtgtgttttttttttttttttttttttttgagacagtcttgctccgtggtccaggctggagtgtagtggccccaatgctggatcactgcaacctccacctcccaggttgaagtgattctcctgcctcagcctcccaagtagctgggattacaagcacacgccaccacacccagctaatttttgtatttttagtagagaaggggtttcaccatgttggccaggctggtctcgaactcctgacctcaggtaatccacccgcctcagcctcccaaagtgctgggattacaggcgtgagccaccaagcccagccaaaccttcattaaaagaaataacaaaataagttctgcagacagaagaaaaattaccacaaataggtcccatggaagtggaggaaaaaatttaaaataccagaaaagatgtataggtaggtaagcaagtgattattgactttaaaacaacagtaacaacatcttgaaacttttataatatgtggtaaggccgggctgagagcagtggctcagacttgtaatctcagcactttggaaagctgaagtgggcagatcacctgaggtcaggagttcaagaccagcctggctaacatggtgaaaccccacctctactaaaaatacaaaaattagccaggcatggtggcacatgcttgtaatcccagctacttgggaggctgaggcacaagaatcacgaatctgggaggtaaaagttgcagtgagccaaggtcacaccactgcactcactcctaggtgacagagtgagactccgtcttaaaaaaaaaaaaaaaaaaagtaaggccaggcatggtggctcatgcctgtaatcccagcactttgggaggcccagacaggcggatcacttgaggccaagagttcaagaccagcctgggcaacatggcaaaacctcatctctactaaaaatacagaaagtagctgggtgtggtggcatgctcctgcaattccagctacttgggaggctgaggcagagaactgcttgaacccaggagacaaaggttgcagtgagccgagatcacaccaccacactccatcctgcacaacagagactccgtctcaaaaaaaaagattactagctcaaagcgacaggatggtgacaactaacagttataactttatttatttgggaagtggtaaaggaactaatgtaaagtaatgtatattggtaatgtatattgaaacctctagggaaaccaccaaaagaataataaaaggatatataactaaaaagaaataaagaggccgggtgcagtgactcacacctgtaatcccagcactttgagaggccaagacaggtggatcactaatggtcaggagttcaagaccagcctggcaaatgtggtgaaaccccatttgtactaaaactacaaagattagccgggcatggtagcaggtgactgtaatctcagctacttgagaggctgaggcaggagaatcgcttgagcccaggaggcagaggttgcagtaagccaagatcacacaactgcgccccagcctgggcaacagagcgagactccatctccaaaaaaaaaaaaaaaaaaaattattaaaaaaatgaagaaaaggaatagttaggccaggcgaggtccactttgggagactgacggcagatcatttgagctcaggagttccagaccagcctgggcaacatggcaaaaccccatctctacaaaaaaaatagccaggtgtggtggtgcatgcctgtggttccagctactcaggagactaaggttggaagacggcttgagcccaggaggctgaggctgcagtgagctgtgatcatgccactgtacttcagcctgggtgacagagtgagaccctgtctcaaaaaaaaaaagaaaaagaaaagaaatacagagtagttgccaggcgcagtggctcacacctgtaatcccagcactatgggatcctgaggcgggtggatcacctgaggtcagcagctctagaccagcctggccaacgtggttaaaccctgtttctattaaaaatacaaaatgagccaggcgtggtggcgggcgcctgtaatcccagctactcaggaggcttaggcaggagaatcgcttgaacccgggaggcggaggttgcagtgagccgagatttcgccattgcactccagcctgggcaaccagagtgaaactctttctcaaaaaaaaaaaaaaaaaaaaagagaaatacagaataagtagaatactttttacctttttgaaatcctgctgtcatcttaatacttgattaatcaaaaaaaaaaagtgagagaaagaataaagaaaaaatgagataaagaacaggtagacttaaacccaattatgtttaattatgttaaatacaaatgagcaaggcacagtggctcacacctataatcccagcactttgggaagccaaggcgggaggactgcctgagtccaagagttcaagatgagcctaggccatatagtgagacagtctctagaaaaaaaaattttttttaattagccggccatgatggcatacacgtatagactcagctactcaggaggctgaggcaggaggatcccttgaacccaggaggtcaaagctgcagtgtgccatgatcatgccactgcactccaccctgggcaacaaagtgagaacttgtctggaaaacaaaaaaaaaatacaaatgaccaaaacatcactaaaagaatgcacataaaactacacgctgtttacgggagataaactttaaacatgtgaacacaaaaaggttgaaaggaaaaggacagaaaaagatacactgtgccattgctaaccaaaagaagttggtgtggctatattaatgtaaggcaaagcagatgggaagacaagaagattataatgaataaagcattttctaatatttaaggtcaattcaataggaaaacaaaaatcctaaatttgaatgtacctaataacagcttcaaaaaaggacaaaaagagcaacaaatccacagtcatatttggagattttttttttttttttttttgagatggagtcttgctctgtcgcccaggctggagtgcagtggcacaatctccgctcactgtaacctccgcctcttggattcaagcaattctcctgcctcaacctcccaagtagctgggactacaggcatgtaccaccatgcctggctaatttttctatttatagtagagacgggtttcacaaggttgatcaggctggtcttgaactcctgacctcaagtgatctgcccgccttggccccctaaagtgttgggattacatgcgtgagccaccacatctggccgtagttggagattttaacaaatctttctcaggaatcaatacagtaagcttgcaaaaatccataaggatacatatgatctgaaaataaacaagtcactcaacttttatcccttagatacaaataacttcttcttgttgggtgagcctatggaaactagtaactactctcttttaaggtagcacagccagccaggcacagtagttcacacctgtaatcccagcactttgggaggccaaggtcggtggatcacctgaggtcaggagtttgagacaccagcctgaccattatggtgaaatcccatctctactaaaaatacaaaaattaggcctggtgcagtggctcacacctgtaattccagcactttgggaggctgaggtgggtggatcacaaggtcaagagatagagaccatcctggccaacacggtgaaaccctgtctctactaaaaattcaagaattagctgggcatggtggcatgtgcctgtagtcccagctactcaggagggctgaggcaggagaatcacttgaacccaggaggcggaggttgcagtgagccaagactgcgccactgcactccagcctggcgacggtgcaagactgtctcaaaaagaaaaaaaaaaaaaaaaccttatcggggtgtggctgcgccctcctgtagtcccagctacttgggacactgaatcgggaggatcacctgtgcccaggagtttgacgctgcagtgagccattcattattgggtcactgcagtccagcctggacaacaagagacccaaactcaaaaaacaaagaattgagactagttatctttaagtatcttttttttttttttttgagaccgagtctcactctgtcaccaggctggagtgcagtggtgcaatcttggctcactgcaacctctgcttcccgggttcaagtgattctcctgcctcagcctcccgagtagctgggactacaggcgcccgccaccacgtctggctaattttttgtatttttagtagagatgaggtttcaccatgttggccaggatggtctcgatctcttgaccttgtgatccacccgcctcagcctccccaagtgctgggattacaagtgtgagccaccgcacctggcctagatatctttaaatatctcaccctgcattgggcctgtcaaatccatgttatttaattgtaattttcatgtatacgagtggtaaagacagaggaggaaggaaatataactacagaactgagcctaagaattcggaaggactaggtttgtagaggggtttatttaaagggaaagagattaagagacttaataattgaataatgtgttacatttttgtgggccattttctttgaccggaaaaaataccagaagatccttatatttagtgtatcattagaaaactcattaagatttaaagaaatatattggagtagtccttttgtgtgaggaacagacttaaaagttatttatactgaaatcagaatttggtttattagaattgcaagtagtcatttttcttaaaccttcaagtacaaatcttatttataaatccagaaacaaatagttacttttattctttggttactgtttaattgataattgaaaatttgtttatttattttgagatggagttttgctcttgttgcctaggccggagtgcaatggcttgatctcagaccattgcaacctctgcctcctgggttcaagtgattctcctgcctcagcctcccaagtagctgggattacaggcacctgccaccacgcccggctaagttttgtatttttagtagagacggggtttcaccctgttggccaggctggtcttgaactcctgacctcaggtgatccacctgcctcagcctcctaaagtgctgggatgacaggtgtgagccactgagcctggttataattgaaaatttaatcataaaatattttataccacttacacatttaatcaaatttccttgggcatttttcactacacttagaagcgtacagttattttaatcacctcagcagggttaacttagacaaacctaaccatgaattttctaagactaaacttgtaaatagatttcaaatttattttgtaattttttttactctatcaaacaaataaatgtaactcagtaattacaaaacttgttactacatcagaatatgtacttgtatgaatatcaatgtattatatgtatatattttatgtatatatgtttgtatgtatatattgcacatattatatgtatatatacttgtgtgaatacatttgtactttcctttttcttcatcttcgcttgttaaccttcctgggttatgacttaattacccaaactgggaggagactggtattaccattttaagtactctacaggattaaggaatcaggttatgatagaagattataggctatgacttggaacttgggtgcactgccagatactttaagtcttaggctgagccttttttaatagtaaaacccctttaaaacaaaaacctcttttacaattttgtatttcccacaagtcttgaaactaatcccattatcatttaattttcacagtggaactctaaaagacccttccatcctgagggtagctaatttctttcctctatagattctgtattgtccttgactatagagatctatcattctataggtatttcatttgtaacttggggacacttaatgatcatggtagtgtgattgatgagctacagtctagcaatatagcagtgcaggtagagactagaaacttgggagctggacacggaggctcacacctgtaaaccaaggttttgtaaactttttttctacagatgaggtgttgcttatgttgcccaggctgctctcaaacccctggcaccaagtgatcctcccacctcagactctcaagtctctgtgtagccttagccaccacacttggcttcaattcttataagaagcaaaagtaggcctggcaaggtgactcatgcctgtaatcccagcactttgggaggccaatgcaggtggatcactgaaggtcaggagttcgagactagccgggccaacatggtgaaaccccgtctctactaaaaacacaaaaagtagccaggcatagtggtacatgtctgtaatcccagctactcaggaggctgaggcaggagaactgcatgaacctgtgaggcagaggttgcagtcagccaagattataccactgcactccagcctgggcaacagaatgacaccttgtctcaaaaaaaaaaaaaaaaaaaagcaaaagtaccaaaaatactcttgcccccaaatacaggttggaataacagcatggtcacaagtttaagataaattgtggctttacaaacactaatactagaatcatctaaaaagctttttaaaatactgatgtccagtcccaccacaaagattctgatttaactggtttggggcatactctgggcaaccagattttataaagctccccagatgattctcatctgaagatgaaaaccactaagaaaaaggaacaagttaccatcataaggaacaataagacaaatacagaatgtaaaacattctacaggataaatgatttggtctccagtaaatcaatggcatagaaacaagactattcaagataaaaagagatttaagataatcagggaaggggcaggatgcggtgagtcacacctataatcccagcactttgggaggccgaggcgggcaggtcacaaggtcaagagatggagaccatcctggcccacatggtgaacagccgtctctactaaaactacgaaaattagctgggcatagtggtgtgcgcctgtagtcccagctacttgggaggctgaagcaggcaaatcgcttgaacccgggaggcagaggttgcagtgagccgagatcacaccactgcactccagcctggcgacagagtgagactccatctcaaaaaaaaacaaaacaaaaatcagggaaggtgtggtggctcacacctgtaattccaactttgggaggagcatttgagaccagcctggacaacatagcgagtctttttctctaggggaaaaaaaaaaaacttagccaggtgtggtggcacatgcctgtggtcccagctactcaggaggtggagggctgaggtgggaagattgcttgagcctgggaaatggaggcttcagtgagctgtgatcacaccactgcaccccagcctgggtaatagagtgagacccagggtggggcggggagagaatcaatcagtcaatgcatgtatggacctttctcaagaccaaatcaaactaattgtaaaaagacacccagggaggccgggcgcggtggctcacgcctgtaatcccagcactttgggaggcagaggcaggcggatcatgaggtcaggagatcgagaccatcctggctaacacagtgaaaccccgcctctactaaaaatacagaaaaattagccgggcgtggtggcggacgcctgtagtcccagctactcgggaggctgaggctggagaatggcgtgaatccgggaggcggagcttgcagtgagccgagatcgcaccgctgcactccagcctgggcgacagagcgagactccgtctcaaaaaaaaaaaaaaaaaaaagacacccagggaacaaaaagaaaatctggatatggactctgtgatattggcacttgatgatataataagcagtccttattttttagagatgaactctgacaaacttagagatgaaatgtagtgtctggaatctgccttaaaacattccaacacattaaccagtgaaatgaatggctttctggaatttgcttaaaaacaagggagcagacaatatgcaacattctctgataatcactgaagttggaaaatgggcacctagtgggtgggtcatttattctattatttttgtttgaagatgtccattgatagtttcttaaaacatatgtatacctcaaacagaaaccaaagtaaatatagcaagttagtaactttcaaaattcaaatttgttggccaggcgcagtggctcacgcctgtaatcccagcactttgggacacagaggcgggcagatcacctgaagttaggagttcaagaccagcctggccaacatggtgaaaccccttctccactaaaaatataaaaattagccaggtgcctgtaatcccagcactttgggacacagaggcaggcagatcacctgaagtcaggagttcgagaccagcctggccaacagggtgaaaccccatctctactaaaaatacaaaaattagccaggtgcctgtaatcccagctactgaggaggctgaggcaggaggatcacttgaacccaggaggcagaggttgcagtgagccgaggctgctcctcaaaacagactgtctcaaaaaaaaaaattattattattcaaatttgatgatatacagcggtgcattacattattctcatttgtgtacatctgaaatacttcttttttgttgttgcgtttcgagacagggtctcgctcacctaggctggagcacagtggcttgatcagggctcactacatcctcaacctcactttaggcaggtctagaactcctggcctcaagcgtcctgccaaagtgctgggattacaggtgttagcaccgcagctggcctggaatacttcttaataaggtatttttaaaagactttgaaagtttagaaacgatacatataccattaacaaaagaataattctctacacatgaggctcatcatcactcagtcctgggggactggagggcagagaggaaggtaaaaaaagaaaggacacccaccagacagaccaaatcagggaggcaatgatagatgccatatgtcatagccaaatcacagccatattatcacagaatttaagtgattttaaacaatagtaagtagggttttaagcaattctaccaacaaaagccaaaaaatttatataaattttttttttaaaaaaaagaaactaggccttgctccatctcccaggctggaatgcagtggcaggaggatagttcaatgcagcctcaaactcccagagtcaagtgatccttccgcctcagcctccgaaatagctgggactacaggcacgcaccaccacagccgcctaattttctgttacttattctttgtggagacaagagttggtctgaactcctggcctcaagtgatcctcccacctcggcctcctaatgtgctgagattgcagccatgagccactgcacccagcccctataaatgtattttaaaagtaacttttccagtagttacagcactacatttgtttcaagttattttctctcaggtagcacgacaacagcgtcataaccagtaatgcttttccgcttcaccgataaggctatattatccgtgaagaaaactaaaagagggcatcctttaaatgtttcctcaacgtttacaaaaataaactatctcaaaatgtcaaactcaacacattgccatcagaatttttagaactcattcccttgaaaacatccactgttaaagtgtttacttcaaaatctaagaaagcaaatattaaaattatttattacttgcaccaggcttcaagtgttaactgttcatggaaataacacatcctctggtctcttctgttgtctaattcaaaaccagtaatcttctaccacttttttttcttcttttcacttgccaccatactctaccactcaagtgttacaggtcttccaactgtggtaaaagatcactcagaagctcttttctttctcaattgttttccttatacaagatgctgaatatggcctggcaattaatgaattcctttatcctaataacgaaacggcaaaaatatattcctgaaaaatgtctccagtaaaaacaaacgaatccctgcaactgctgtaactatagataaaagcaagttatatagaaacattaaccaagttcacaaaagaaatgagactgtaatgcaagattaaccgagctcaaaagaaaagtgcctatttaaagcactttattgtgttatctacaagatcagtgtgaaactcatcaatcaactactgcgttcaacaaatattgtacagtagaaaggagcacaagcactacagtggcatattcatacagctgcaagatttttatgacgctgctgacaaaacaaaaaataaaaagctcaacacaagaacatttctccaccttcagagaccaatgattctattcctagggaacaagtggggggacagacccgggcggggcaagagcagcgaggccaatcagagcgcgagttacaagcgcggtggagcggggaagcgaatgaaaccgcccagttgaatggctggctgcgcacgccacacccccgcagaggcggccgcacctggagccccacccctgccgcaggacctccgcgagtcgcccccaccgctccgccccgcgccgcccccaatgactgtttcctgccaaaacaaacctggccgcctcaaaaacaaaacaaaatcttcagccgggaacgcagctatccccgggccgccccccagtgcgggtcacactttgcaccccacgggccggggtccccgcgaggggaaggggcgggggcggggggcggtgcacggaaaacccggggagcaaacgtgcccaatgctcaccaactcctcgtagctcctgttgtgctcgttgccctcccagtccaatctcttcggcaacaactggaaagacacgaaacgcacacgagtgaccacccctccggcgcggggggggcggggggcggggggccgggggcgggcggcgggcggcgggcggggggcgcgggcgagcatccctcagggcaaggtcggcaggaggaacccgagggagcgcggggacgggcgcgcacagacctggtactgctccagctcctgcaccagcacctgcggccgagagacgcgcggtcaggggtggggtcgggcccggggcgctcccgtttcacccccgcccaccacccgcgacccccggcggcggggacactggggacgccaagtccgcagccgcccgcgggcccgcactcacctgggccgctctccgacacgggcccgccgataggtaccgggcgataaggaagtacagctctgcgggaagacaaggagtcaggtcaagccccggcggggaggggagggggacggggccaggggagccgggggagcccggggagccggggaagccgaagcagccgggagcgccagggcgggggtggcacggcctcgcgtcttacccgactcgatgagaggcaccgggcgtcgggcggacgacggctccgccatggccgggcgcggggcgggaggcgggagcgagcgagcgagcggagcgtgtaggccgcgccgaggcctgaccgggctggcgtcccctcttctcaggcgcgcgccgccgccgccgccgccgccgccataccgtgcgcgccgcctggaccgacgcctccgcgggggaggaagtagttcctccgcgggagacgaaaagtagtccctccgcggggggcgggggtttgcgccaagagaggaccggagctcgtgtcccgcccggggaggcgaacctcgctcagctctctgcctccggggactcgatgaggagaaagtgacgcggaggcaaagacctgggcgccgcagcagcgagtgggggaggggagggcgcgtggtccgaatccctgcgcgcaatgaggcggctgcccgggctttgtgaggcggcagcgcgacgccgggtggcccagcagcgggcgggtgccgggggcggaagcgcggccacaagagggggcgattcaccgccgccccccgtgggacctgggtcctctacgcgggaccgcaggggccccgagtcgcgggttgggcaaggtcgcccgctccgggtcgctcggaagggtcatttcacggaccggtcgtctggggccagtgcgtcttgccccgcacggaagacccctcgcttcgaggacaggaaagcttttaaagtgaggattggctcgccgcgcctcccgcagaggggaacgccgcccggacccgcgctcctggggcgggggcctcgtatgctggcgttgccggagcgtctgcggcgctgaaggctgccgagacccagccacatcccccacaagccagcagcccggcagaaaattacataaaatgcagcgcttcgccgagggggtgcgagtcgggggagcagcgcgcagctgcggctgacggctcggctggatccatccaagcatggacaggaaaacgggactgtggggagagggtggtgcagacgggccgcagaccctccttaggaagagaagccggaaactagggagtcatgtgcagttagaatcctcttggaagactagtaggatgtgaggttggagaggtggacgacgaccagaaaattcccttgtcttgccaggcttctgacctaactatgagtttcctccgcgcatccagcctgccctgctctggcccctaaagtacagcagtaacactcagtggtgtccctgccttcctggaatgcgcgttaacaattctgattcttactcatggcaataacctacacaccacatagacgttaaatgtggttcgggtcagactctagggcaggactcactgcctgcaccttgtcttggctccaccagcttgaccttgagcaagtcacaacctgtgggtctcagtgttccttactagtaaaccgtaggtaattcctcactagtaaacagataatatttgtgcctgtctcaaagttgtgaggatttaatgaatttgtgttcctggtatacagtaagcaccgtgtacaagttggcttttatttacaccaaatagcaaaagcttttatttattttgagacagggtcttgctctcaggctggagtgcagtggcgcgatctcacctcactgcaacctctgcctcccgggttccagcgattcttgtgcctcagcctcccgagtagctggaattgcaggcaagcgccaccacgtccggctaatttttatatttttatatttttagtagggacgggtttcaccatgttggccaggctggtctcgaactcctggcctcaggtgatccacccgccttggcctcccgaagtgctggggattacatgcatgagccactgcgcctggccaaaagcttttatatatatttataaatggacatagatatctgtgaggctgtcgggtatggtggctcacgcctgtagtcccaagcactttgggaggccgaggcaggcggatcacgaggtcaggaaatcaagaccatcctggccaacatagtgaaacccccgtctctactaaaaataaaaaaattagccaggtgtggcagtgcgcgcctctagtcccagctacttgagaggctgaggcaggagaatcgcttgaaccccggaggcggaggctgcagtgaaccgagatcgcgccactgcactccagcctgggcgacaaggcgagactccgtctccaaaaaaaaaaagctatttgtgaggtaacaatctaaatatgtttgagctagtgcaacagtaagttaactccttacatctgttaattcagcaagcactaacaagtgatggagattaaaaaaaaaaaaggaatgagccacagctttgccatcaaagacttcagcgtctcttaggggaaacagatgtaagcaaataatgacacgatttagggcagagatatatcagaagatcagcttgcctgtgcgtgggggaaatgttagggaagtttgggttatccaggctacaatgtgtggaaagggatttcgcacatacaaacaacagagggccaagacatgaatatgatttctagtttaaggaaccagaagtttagtatgactacttggggtgactttggagaggatgggaccatgatgtcagaagttgaaattgggagcaattgaaagattctaagccaggaaggaatcattttctattttaggatggatttgagaaagttaagaccaagaggcacttaacatacccctgaaatagaaaagaaatgatgcatgagggcgttggtcataaggatagagaagagacaagatcagaagtatgtaggacagtaaatctgcaagatgaagttggggtgaaataaaaaccacaaaaatctcgtttggggctttccaaggttgtgccaacaaataaggtagggcatacaggctggtagctagattgttaagatgagtaactgcttgcaacaacttgattatttgaagttacagtgcatagatgactgtgggacagtgatctgatgctgcaagattaccagtgttaccaaatgacaaagacatcaagaggggagaatttaaactttcaatgattgaccaaggagttgtgcatttcattttgtaacaagggcgtaagattaaaaaccccctaaagatattacaagaatttatatcccaagctctggtcattgtccaaaattatcgttctgatactggcaccatgataaccattacaagagatcagaaatgatgacacgagcccagacacagtggctcacacctgtaatcccagcgctttgggaggccaaggccagaggactgcttgagcccaggagttcgagaccagcctgagtaacatagtaagaccccatctctacaagaaataaaaaatagccaggggtggtaggtgtgtacctgtagccccagctacttaagaggctgaggcatgagaatggctagagccgggggggattgacgctgcagtgacccatgatcacagcactgctctccagcctaggcagcagagcaagaccctgtctcaaaaaaaagacacgatgacatgagttttcctttacaagagccttgggagtccttttacaacttactatcacattcatgacaaatattctttctaaattttgaataggaacaaagatttctaacaagagagagaatatcttcccgattcgactcccatatgtcaagagactcagatgtgactcatatttgcctgccaggaggaggaaaaagaaatacactgtccaggagcaactccttagtgggtacccaccagaagtggtctccaaacaaggcaagaatctgtgtattcctcacacaattcaatcccagccattccatatgtacacactgaggtttgcttttgggtaaatggaaataactttagagtttcaccacaagaaagctacatggtaagcaagtgttggaaaatcttaacagtgggtgacattaagctatagggttgcattttcaagggaaccaacatcttatgccgtggcaagcaactcctgactggataaacagctcttagatgtcattgataggctcaagctgaggcgcagaggaagtatggcccaagggcatatagctggtaagtggtggctggactgcaatcccaagtagacagtattatcttagactgaaacacaaacactgcaaagtccattctcccttggccacgtttcacaaaagaggaaatgggacctgaaaattaggagacttacacaggattgcacagctagcgcatcagagagctgacatttggaagcccacgtgataagtacgtgtgtaatctcatttaccgcaggcaactcttagattctgttattcccattttaagaatgaggaaactagtctgggcgtagtggctctcgtctgtgctatcagcactttggaagaccaaggcaggaggaccgcatgagcccaggagttcaaggctggtcttaaacatagtgagaccctctctctacaaaaaattaaaaacttagtccatgcatggtgttgggtgactgtagtttgagctatttggggagactgaggcaggagatcacttgagcccaggagtttaaggctgtcacaagctatggtggtaccactgtgctccagcctgggcaacagagcgagaccctgtctcaaaaaagaatgaggaactaaggctaataaagtttaagaatttgcctaaaaatggaaagcttttttttttaatctgtctgtgaatgagaggaaaataaaattcagtaaggccttccaaatcaccacttaggaagcccaacaacgttaaatatgaatgcatatctagaaaatggtgaccaaagaagtctggttccaacaattcacataagagagtggtcaaaatggaatgaattagtagattagagtccatttcaaaagactctgaaaaatgagataaggaaatctgtgagcaatggagaacatgcaaaacaactcagatacctaatccaaagcctaatattagttttaatgcaaatttgtgttaactgaatttaggttcattcaggaggctgtgctgatgttgatgtacacacaacatcagcatacctctgaagggcaggaagtagatgacgttggacctccagaacactataccacaaactggatcagcacctagaggtgaaattaaatgcacacaaaaacctggatcacttcattcattcattcaacaaaatatgtgttaaaagtcttccctggctcctgggctgttttttgttttgtttttttccgctttagagacagtatgtcattctgtcacacaggcaggagtgcagtggtacagtcagagctcactgcagcctcgcagtcctaccgctgagtacttgagactacaggtgtgcaccaccatgcctggctaattttttactgttttttagagatgcgggtcttgctctgttgcccaggctggtctcaaactcctggcctcaagtgatcctcccgccttgatcttcctggacttctgttggataaattccctaggaagaggagagttaacacttcgatagattttatttatttatttattttttagagacagggtctcactgcattgcctggccttaagtgaccctcctgtcttggccttccaaagtgctgggattacaggcgtgagccaccacacctggactttgatcgatttttggaggactttcaaagtaaaaatgaagaaggtatctgatcttttgataagcccttagtcactagtagatattatattgcatttaattcctgatgcccttcctccacctactagtggtgtcatctttcccacaggaccttttcttccttttaagtctaacccaaccagctgtccccttaatgctacttgtccctgccttcctcagcaaattgtttccacatttatctcttccctctccaacttctgcctctcccttgccattggcttctgtcctatttgttcccagcttgcaggcgctggcccatgtctgtctccaagtcttactcgttcttactttgaaacatttctcacagcactagagaaaacacagtgtggttggacaagaccttgggaacatgggagctgggatcagaatgtgtctgtgtttggatgtcggagttgggcaacctcttggctcggatatttttctgttcgttttgtttaataatctttaaaataagcatgacaactaataacatttattggatatgtttgtatgctggacactgtcctaaatcatttccatgcattatttaaggatcatgagacagctagaggtgtttgtgagcatttccagagagcatgcctgtgaagctcgctgaacaatgcccagctctcaacatgaccctgttatataagaataattctttttctctccattcccacttagttcaggccctcaatcatcaacaagcatcctccttaaagttctccctgactctccacctaattaatcctgtcattttatttttttcttttcatttatttatttttattttctttgccacttctgtatcttctttggagataatcctgtcactacttttaaaaaccttaagtgcaacttaacatattgcttccctgttcacgtctttctcattcgctgtcacctcaaacccaaactccttggcttgcttttaacactgtggaggacattctactctcctccctccctgctccacacccaggaaagatgactgtgcagtaaagccatggctcgcttgcccttgagtttccaatgggattcatctggtaagaggcctcagccagagatggaagggtgggaggagagtgaggttggagtttccattttcccagctcctttcctgccaagccacaggttgatagtaactgctatttgtgtgcatatagagaccctctctttgcacatagagaccctctctgggctttaagaccactgcctcccctgccccttaaggagttgggcttcccttttttttcttgttgaaacagtgtctcagtctgtcatccagggtggagtgcagtagtgcaatcacgtctcactgcagcctcgatctttcaggcacaattgatcctcccacctctgcctcccaggtaactgggactacaggcacccaccaccacaactggctagtttttgcattttttctacagacggggattcaccatgttgtccaggttggtctcgaactcctgggctcaagcaatcctctggctcagcttcccaaagtgctaggattataggtgtgactaccatacccaagccgttaatctcttttcaaaaaccttagagtcatatctttttttttttttttttttttgagacagaatcttgctctcttgcccaggctggagtgcaatggcatgatctcggctcactacaccctccgcctcccaggttcaagcaattctgcctcagcctccccagtagctgggactacaggtgcacaccaccacatccagctaatttttgtatttttagtaaagacagggttttaccatgttggccaggctggtctcgaactcctgacctcaggtgatccacttgctttggcctcccaaagtgctgggattacaggcgtgagccacatgcctggccagagtcataacttttatatcatacatgcaactcatcagtaaaccatccaattagcttaccttcaaaatgtatccagaatctaagcacttctcatccggaagagcaccacaacctcttatgtcttactgcttctaccttcatcctatttctgtgtattctcaggcagctggagggatcctgttaaaacttaagacagggccaggcgtagtggctcatgcctgtaatcccagcactttgggaggccggggcaggtggattacctgaggtcaggagtttgagaccagcctgaccaacacagtgaaaccctgtctctactaaaaatacaaaaattagccgggtatggtggcgtgtgcttgtaatcccagctactcaggaggctgaggcaggagaattgcctgaacccaggaggtggaggttgcagtgagccgagatcgagccattgtactccagcctgggcaacgagagcgaaactccatctcaagaaaaaaaaaaaaacaaactaaagacggacttgtccttcctctctcaaaatcctccagaggctcccatcagacccagaggaaaaggccaagtccacacgatctggcctctctctggtttgtcttacctctcacctgactgctccccttctcatagtgctccagcctcactgtggcgtgacctggcccacggctgcctcagggtatttgtacttgctgtttgttctgcaggaatgctcttctcctggaaaaactgcatggctgagtccctcccctccttcaagtcttggctcaaatgtcacattttcagtgagaccttccctaaccaccctaagtacaatttaaacttatcctcactctgtgcccatttctcttttactcttcctgtgttcttttcctccatagcactgttgatcttctaacctactgtaacatgtccccgtctattttgtttattgtctatctcttgaccttctatgaaggcagacagagatctgtgtctgttttgctctctgacacatctgcagggctatgatgagtcctgacatacttatggtaggtatgcaataaatatttgttggatgtttaatgaaaaattgctcaactagacagtccctcaaatatgagatagttatgctttcaacatttcctcaaatctttcagccactgtggtggttagatctgaagacaagcctgggcgcggtggctcacacctgtaatcccagcactttgagaggccgaggcgggccgatcacttgaggtcaggagttcaagaccagcctgaccacatggtgaaactcctgtctccactaaaaatacaaaaaaaaattagccgagcttggtgacaggcacctgtaatcccagctactcaggaggatgaggcaggagaatcacttgaacttgggaggcagaggttgcagtgagcccagatcgcaccactgcactccagcctgggtgacagagcgagactctctcaaaaaaaagatcagaagacaatctgcagaaactcgttgacccataacatacctggagatacggcctccttggctcaaggctcccctcaaaggcagcaggatagtcaaagtctctggagcggaagggtgagtggaaggaaacactttcaggaggagcaatggaggctgctttaggagaggatccccatgctacaggaacggggcatcgtgtccatatatttcccaggtgccccgtgccctccgtggccagcctgcttcaacccactgtcagcagcctgtttcacaggctccatctccctgagcccccgcagaacacagcagtcacccctggcttcccccagcctctctctcagactggctcagtaccctctggtttcctcagggtctcgctgatcccaaagatgaagagacaaaaccggccttgcttgcccccaaggtgagacttcggatctgtggtgagggagggaaaaattccagcagacccaagaggaaggctacagaagaaaggacagaagcgtggagagaaattctaagcaggaggctggggaagaaggaagagcttcaggtcactgggtcaccccaccaggagatagtccccttgtggccttgagacttatgcaatgggcagatgcaatctgggtacctaaggcaaggattgcccttattctggccatgacatttaacacctaattgcagcaataacccctcttttccacctggagaaagcttcctggcccctctttttcacttgtgggtaagtctggccaagagcagggtgaagaaacccatagtctaacacaaaaccacattttttatttttatttttttaattgtagagacagggtcttactgtgttgcctacactggtctcaaacgcctggcctcaagcagtcctcccacttcagcctcccaaagtgctgtgattacaacacaaaaccaccttatcattaaaaaattagggcaaggaacagtggctcacatctgtaatctcaacactctgggaagccagggtgggaggatcacttgagtccagaagttcgagaccagcctgggaacacatacaaaaaccccacctctacaaaaaatacaaaaattagccaggcatggtggtgcgtgcctatagtcccacccactcaggaggctgaggtggggaggacagcttgagcccaggagctggaggttgcagtgaaccgagcttgtgccgttgcactccagcctgggcgactgagagagaccctgtctcaaaaaataaaaattaaaaagcttttaaaaagttaaaatattgaagccaccaaaggttaatatatgaatattggtaattagatgagattaagatgatttttggcttgagaatccagattcacaaatctttttttaatttttattttaggttcaggggtacatgtgcaggtttgttacctgagtatattgcatgattctaaggtttggggtatgaatgatcccatcacccaggtactgagcatagtacccaacagttagtttttcttttctttctttctttctttcattctttctttctttttttgagatggagtttcactcttgttgcccaggctgtagtgcaatggcgcgatctcagctcactgcaacctccgcctcccgggttcaagcgattctcctgcctcagcctcccgagtagctgggattacagacatgcaccaccacgcctggctaattttgtatttttagtagagacggggtttcaccatattggtcaggctcaggagttggtcagctcctgacctcaggtgatccacctgcctcagcctcccacagtgctgggattacaggtgtgagccactgcacccagcctcccacccaaatttcatgttcagttgtaatccccagtgttgcaggtggagcctggtgggaggtaattggatcacaggaggtggatccttatctctctctcttttttttttttttttttttttttttgagacagagtcttgctctgttggctgggctggaatacagtggcacgatctcgcctcactgcaacctctgcctcccgggctcaagcgattctcctgcctcagcctcccgagtagctgggattacaagcctggctaatttttgtatttttagtacagacggggtttcacatatacttcactcatacaggtgggcccatatttcctacatgaaacaggacccatacatagttcacttctaagtgggaaaatatgaaaatacgtcttttaacaaaaacctatatatgaatatttatttgtaagggtcttagtcatgaaatcatcaaaaattggaagcaatcaaaatgttctttaacttgtgaatggataaataaattgtggtacatccacataaggcaatgctgctctataatagaatgaacccatgatacacacagcaacttggatgactctcaaaagcagcatgctatgtcacagaagccaggctcagcaggctacacacataatcattccatatacgtgacatttttacaaaggcgaaactctagggacagagaacggaccagtgctggccaggggctggaggtggaaggaggggctgagtacaaagtagtttcaaataatgttttggggtaattgaaatattccatatcttgactgtgatgacatcgatgtgtttgtcaaaactcatcgacctgtttactaaaaagagagaattttattgtatgtaaattacacttcggtaaacctgactttaaaatagcaatgagttggaaatttcaggaatcaaataacctagagatttgtcaaagggcttttctcctgcctctcagctttaccaaatgctttattgcctagcattatgctatgaggttcatttcagtcctgtgcttgtgagattgttttttttttttttttttttttttgagacagagtttcgctgatctcggctcactacaacctatacctcctgggttcaagtgattctcctgcctcagcctcccgagtagctgggattgcaggcgcccaccaccacgcccggctaatttttgtaattttaacagagatggggtttcaccatgttggccaggctggtctcaaactcctgacctcaggtgatccacccatctcggcctcccaaagtactgggattataggcataagccaccgcgcctggaccccctcatacttttttaacttttaaaattcattcatataaaagcatatgtgtaatgtatttttaattttgtttttgtttattattttgtaatgtatttttttacatgtattattttgtaatgtatttagtattttgtaatgtatttattttttatttgtttgtttgagacggtcttgctctgtcacctaggctagagtgcagtggtgtgatcacagctctttgcagcctcaaactcctgggcttttgccatcctcccacctcagcctcccaagcagctggggctacaagtgtgtgccaccacacctggttaatttattaatttttcttttgaggagaaggggtcttgctatgttgaccagtctggtttcaaactcttggcctcaagtgatcctccagcctctgcctcccaaagtgctgggattacaggtgtgagccaccactcctggccaaaataatatatgtaatgtagatgtaaggtattacactcaatattaaaataaattgctttgaagccagcatctgatgtaagaattaaaacatcatcaacatcattgaagctgcccttctgccctttcttttgttttttgttttttgagacggagtctcgctcagtcacccaggctggagtgcagtggcgtgatcttggctcactgcaacctccgcctcctgggttcaagcagttttcatgcctcagcctcccaagtagctgggatgacaggtgtgtgccaccacacccagctaatttttgtatttttagtagagacagggtttcaccatgttggctaggctggtcttgaactcctgacctcaggtgatctgcccacctccgcctcccaaagtgctgggattacaagcgtgagccactcgcccgactgaagctgccctttctatagcactcccctgctggtccccagaggcatccactggcctgaactttatgtatatcagaatctcgctttgctttttatgagtagttttactagatatgtaggattcccttataacattgtttagcttccttggttttgagtttggtaaaaatggaatcagctaggtgcagtggctcaagcctgtatttgcagcgcattgggagagcaaggcaggaggaggactgcttgaggtcaggatttggagaccaacctgggcaacatagcaagagcccatctacacaaaaaattaaaaacaaaacaaaaaatgtatccaggctggtgacctgcacctgcagtgccagctactcgggaggctgagacaggaggatcacttgagcctgggaggtcgaggctgcggtgagctatgatggtgccactgtactggggatcattcatatgtagattgtgtcagcttgaaaacaaaagttcattcttatgcttcaaaggaagagattgtattgaagaaactgcaagttgtggccaaagttaaggaaaccaaccaggtgcaattgaagctcccagggatgagcagctgtggaaagccatgaccaccctaggcctgatggagccagggagaacacctgtgccctgagagctgggtcactaggtcactggctgaggaggtccactgggagccacagccgtgcagccactgccggcacagctctagcaggggagagatactccaggctctcttttgccctgctggtgtctcctgttgggagaatctggctggagctcagctgcaggaagaccctagtgcagcagtctgttggattcagactgttggaacatagcacagagcaaaggacggagtgtgatcagggaaggggttggaagcatcttttctcaaaattttctcactcaatacagaattgtttcaaacgttcattcctgttgagcatggctgtgattcattcatttttaagtagtttaatatgccactgggtacaaagaccacaatgtattaatccattctcttgtggttggatgtctgggttgtttctagctttttgggttttttttgttttttttttttagtttttacaattatgaaaatgaatactgtatgaaggtttctgagataacggaaagaggcctttgcccacaaccaagagtgccatcaaaggtgggagagatgggcatatggtatatgcctgcaaccccagcattttgggaggctgaggcagcaggatcatttgaggccaagagtttgaggtcagcctaggtagcctaccaaaactctgtttctacaaaaacattttaaaacttagccgggcatggtaacatgcgcctctaatcccagtctccttgggagactgaggcaggaggatgacttgaggctaggagttcaaggctgcagtgagctatgatcgcgccactgcactccggcctttgctacagagcaagagcctgtctcttaataaataaataaataaatgaataaataaataaataaataaaattaaataaagtgggagatatctcgtgcttttcctcagtcagagatgacctagccacctcaccttgctctaggtaggattaattgacaaggcaacggatcttgttttttattatggttaagtatacataacatagacatttaccattttaacaatttctagtgtatgattcagtggcattaagtatattcccaggacagctgtttttctagtagtgaaactgaaccagtagcaagctggtatacttttttttttttgagacggagtcttgctctgttgcccaggctggagtgcaatggcgtgatctcggctcactgcaacctctgcctcctaggttcaagtgattctcctgcctcagcctcccaagtagctgggattacgggtacttgccaccacacctggctactttttgtatttttagtagagatgaggtttcgccatgttggccaggctggtctcaaactcccaacctcggatgatctgcccacctcagtctcccaaagtgctgggattataggcgtaagtcaccacgcccagccactggcatgatttttaaaccaagatcgctccctggaattttacatacataatatgctccacttgtcacaacctcttgatttatttataagaaaggcattcacagttcttgtggaattcacttgagaatgagagtacaagtttttattttcatgttttttttccaaggagtccccaaagcattaaagatatagtgaatggaaaggaggtcttgggcctaggaagcagaagttgatgatgccaattttatcagtccccaattgagagacatttgactattttcaatttccatcattacaaacaattctgccattaacatctttgtctgtgtctccttgaactcttgtacttctttagggtaaacactgaagaatggcattgccaggacataggaaataccacatttaatttaataggtactgccaaatttccctgtcgattctgaaaacttctggaatgcttagatcaagatctcaatgtctcagtcactgtctagggcccagaagatctaaaaacatgtttggataggtgttcctaaaatacgtcatttaggttatgtctctcccaggcctgctcgagttactggtacacagatctttaattcactcaacaagtgtttattgaatgtctattatgtgctagggctgttccaagctctgaggatgaagaagtgggaagaggagacaagtccctccaatctagtcgggaaggtgtattctcactgtttcacctcaggctgttctcaagtgtgtctgatccataataggaacacagtgttcatgcattcatgctggtcttgcttggaaaaagatcatctttcttggttttttggctataacaaatagtttgtattaatagtagccaaatttttaactttccatcaaaatatgccatgtccaattttgtccataattatgttaactcaggagctcaaaattgtgccatatttatccaagagaaataaaaacatattcacaaaaaaacctctttgtaccagaatgtagtgttcattgcagctttatttctaatagccaaaaaaaaaaaaaaaaacaccccagccgagatatccatcaataggagaatggataaacaagttgtggcatattcaccaatgaaaaggaatgagccactgatgcaagcaaatggcataagtgagtctcagaaacattcttctgagtgaaagaagagtacacactgcatcatgattccatctatatgcagacccgactagaacaggcacaactaatctatggtgggaaaacgtgaagccacaagggatgggggcaagaatcgagtgggtaggggcatgggagaccttctgagggtgatggcagtttatcttgatgaggtgttgggtacacaggtgcatcttttttttttttttttgagacagagtctcactcctgcccaggctggagtgtagtgacacaatcacagctcactgcaacctccgcctcctgggttcaagtgattctcctgcctcagcctcccgagtagctggttacaggcatgccccaccacacctggctaatttttgtatttttaatagagatggggtttcgccatgttggccaggctggtctggaactgctgacctcaagtaatctgctcgacttggcctcccaaagtgctaggattacaggcatgagctaccacgcccggccacaggtgcatcttatcaaacaggaagcttgagattttacattttatcaaatgcaaattttacatctgaaggaaaaaaaatagaaccataaacaaatatcgagctttaaataataatgtgtatgctgaattattagggggaagtgtactgatgcctgcgatttactttaaaataaatgaaaaataggccaggcacagtggctcacccttgtaatcccagcactttgggatgctgaggtgggtagatcacctgaggtcaggagtttgagaccagcctgaccaatatggtgaaaaccccgtctctactaaaaatacaaaaattagctgggcatggtggcggatgcctgtaatcccagctacttgggaggctgaggcaggaggattgctagaacctgggaggtggaggttgcagtgagccaagatctcaccattgcactccagcctgggtgacagagtgagactccatgtcaaaattaaatagataaataaatgaaaaataaggtgggccgggtgcggtggctcacgcttgtaatcccagcactttgagaggccaaggcaggtggatcatgaggtcaagagttcaagaccagcctggccaagatggtgaaaccctgtctctactaaaaatacgaacattagctggacgtggtggtgggtgcctgtaatcccagctactcgggaggctgaggcaggagaatcacttgaacctgggaggcagaggttgcagtaagccgagattgcaccactgcactccagcctgggcaacagagcgagactcctcaaaaaataataataataataggtgaattgatgaggaatgggcagatggatagaaatatatggaacaaagccactatagtaaaaacaaattgtaaaatctagctggtgtctctatttaaaaaaggatcttttggccaggcacagtggctcacacctgtaatcccagcactttgggaggccaaagtggatgaatcacttaatttcaggagtttgagaccagcctggccaacatagtgaaaccccatctctactaaaaatgcacaaaaaattagccaggtgtggtggcggatgcctgtaattccagctactccagaagctgaggcaggagaatcactggaacctgggagagtgaggttgcagtgagctgagattgcatcattgtactccaacctgggtgacaagagcaagactctatctcaaaaaaaaaaaaaaagaaagaatctttggagatcaaaagcctcaagtcatgtcatcctcagccatgtgaagccagttcagagctttttttttttttttttttggagaggagacagagtctagctctgtcgcccaggctggtgtgcagtggcactatcttggctcactgcaacctttgcctcccgggttcacgccattctcctgcctcagcctcccgagtagctgggattacaggtgcccaccaccacatccagctaatttttgtatttttagtacagacggggtttcactgtgttggccaggctggtctcgaactcctgacctcgtgatctgcccgcctcggcctcccaaagtgctggtattacaagtgtgagccaccgcacccggcccagagctttttgtcggttaaaaaaaagggaatttcttggagggatttaggaaagagtaaaggagagagagtgagcatatgacagcaagggattgcaacagattcttgtctagtggcctccatctccttgaatgcctcccaattcatcctttacaacatttttttggcaacttgaagatcttttcctagaacctttaatccaaaaggagttgctactcagccgacagtgagatgtccatattcaaatgcagaggccacattgcggtttaattacaaactttttttgtgacatactgttccccttgcctgcaaaggcatggattgtcaagagttgactgaaaaatgttttttagaaaccttgcaaattatcagcagattagtgatgtaacagagtacccccatttttctgataaagaacatgagttatttttaaaatgttattttcttttctctttcctccttttcccctgttccccacttcctacttatgtctttaggaatgcagttataaccttgaccttcccttcaccagacactccctacagggcgagcttatctaactgtgtgcttacttagaagctccagagcaggaactttctcccactgggagattgccttgagagacaacagtcaatttacaacgtaacatgtgcctgcaacagaaccgtctcccacctggagagcatctcgagacaatggctactttacaacctagctctgcccaatggcgccagctagaccacccggtagataagacactgaaatgagtcacgtagtacccgcacctgctttctcccttccctgcctgccattcatgccaagtaccccacatttgttttgttttgttttgtttttatttgttttttgagatgaagtctcactctgtcgcccaggctggggtgcaaaggtgcgatcttggctcactacagcctctgcctcccgggttcaagcgattctcctgcctcagcctccccgagcttctggagatggatagtggtgatggttgtacaaaatgtaaatgtacttaatgccaattaactgcacacttgaaaatggctaaaatggtacttttaaaacttttttatttttgagacagtctcgctctgtcgcctaggcttgagtgcagacatatgatctcggctcactgcaacctctgcctcttgggttcaagcaattcttgtgtgtcagcctctagagtagctaggattacacgcgcctgccaccacacccagctaattgttgtatttttagtagagatggggttttgccatgttacccagggtgctctcaaactcctggccttgtgtgatcctcccgcctcagcctcccaaagtgccgggattataggcgtgagccaccatgccctgccaaaatggtacaatttattttatgtatattttaccacaatagaaaaatatttatttaaatttttcaaaacatagatatggggggatctcaccatgttgttcaggctattctcaaactcttgggctcaagcaatcctctcgccttggcctccaaaaatattgggatttatatttatatttcttttgtgaattatcttttcatatcatttgctaatatttctattggtttttttcatattgatggtcatatttctattggattttttctttttcatattgacgataggaattctttttttttttttttttgagatggagttttgctcttctctgcccaggctggagtgcaatggtacgatctctgctcactgcaatctccacctcccaggttcaagcaattctccagcctcagcctcctgagtagctgggattacaggcatctgccaccacgcccagctaatttttgtatttttagtagagacgggggtttctccatgttggtcaggctggtctcaaactcctgacctcaggtgatccgcctgcctcggcctcccaaagtgctgggattacaggcgtgagccacagcgcctggtcgacgacaggaattctttctatagtttgacatctagccctttgttatgtgtgtcacaaaaattttctcccaatctaacatttctcaggtatttgtttacataagatcatatcaagccaggtgagcaccattagtcctagctactggggatgaaagaggctgaggctccttaagcccaggaattggagactgtattgagctatatgattgccccactgtactccagcctgggtgacagagtaagaccccattctctaaaatagaaacaaaccatataaaagtttaaattgttatgaggtcaaatactcctaccttttctttatggcttctgaatttattatctggcagaggaaagaaggccttcttcaattcataatcataaaactattctcctatactttcctctggtgcttttagagtttttctacatttggattgttaaatctgtctggaatttatttctatgtgtggtgtgaagtagagaactaatttatattttccaaaatgaatatccaattgaactgaaacattttattttattttattttttccagacagagtttcactcttgttgcccaggctggagtgcaatggcacgatctcggctcactgcaacctctgcctcccgggttcaagcaattctcctgcctcagcctcccccgtagctgggattacaggtggacaccaccatgctcggctaatttttgtatttttagtagagatagggtgtcaccatgttgatcaggctggtctcgaactcctgacctcaggtgagccacctgcctcaacctcccaaagtgctggaattacaggcatgagctgccgtgcccgacctgaaacttttttgagtggtctcttcctcaacaagctgaaatgctacctttattgtatattaaatttttggctagtctcacaatttttcctatttccaatggaaattctactgggattgtgattggtattgcattacatcttacacagaaaaaaacggacaccctcaaatcgttactcctttcccaatagcagagtcatggaatcaacctaagtgcccatcagcagatgtctggataaagaaaatgtggtacacatacattgtggaatattgcacagccataaaaaaggatgaaatcatgtcttttgcagcaacgtggatgaagctggtgtccattatcctaagtgaaataactcagaaacagaaaatcaaataattcgtgttctcacttataagtgggagccaaacttgggtacatatggacactggggacaccaaaagaggggagggcacaacaggtataacatccactgttctggtgatgggcacacactagaagcctaaacctcaccattacccagtacattcctgtaacaaatctgcacatgtactccctgaatttacaaagattaaaaaaatatatagggccaggcgaggtggctcatgcctgtaattccagcactttcagaggccgaggcaggcgaatcacgaggtcaggagtttgagaccagcctgaccaacatggcgaaaccccgtgtctactaaaaatacaaaaagtagccaggtgtggtggcaagtacctgtaatcccagctacttgggaggctgaggcaggagaatcacttgaacctgggagacagaggttgcagtgaaccgagatcgcgccactgcactccagtctggtgacagagcgagactccgttgcaaaataataataatactataaaaataaaaataaatattaacttttctttaggaacattgtgtgtttctcatttgttctgatcttttttatgtcaaagacttcagtcacatcttatatttttcttggaagagaaaaatgctcttttttttttttttttttttgagacggagtctcgctctgtcgcccaagctggagtgcagtggcaggatctcggctcactgcaagttccacctcccgggttcatgccattctcctgcctcagcctcccgagttgttgggactacaggcgcccgccatcacccccggctaatttgttgtatttttagtagaggtggggtttctccgtgttagccaggatggtctcgatctcctgacctcgtgatccacccacctcggcctcccaaagtgctgggattacaggcgtgagccactgcacccggcccaaaaacgctcatttttgataccaaccaagaaccacaatgagacctgaaaatgtgcgagagcagcgcacccgtccaccaaagcacctaggctctgcccatcccggtatctaggagactgctttattcatattagctcaattaagttcgttgaatttaatatttcattcatattgtctttaaaaatagatgaaataaggagaactgaagcagaaagtgagaaatcatgtgatgacctttaagactgtcttaaatatatttcttttgaaaatctaaatgggcactggtggaaatgacaatcttgcacgttttaatatgcaaccacatccttacataaaaacagccaagcatgcaagactcccaatctttcttctctatgaatcatgcataacagattagtgtattttaaaattctcatacataacttcaatgtattattagtatttgtacattttttaaattagaattttctaaggagtaacaacattaagtgcttttcagagataacatttgtagtataaaattatatataactttttaatataatttgcagttatggattaaatctaaaacacaaaagtaatctttctttacacttaaggatgtaaggaaacactgagggacttaacaaaagccactctctaacaagacagcacagccagattttatgagtacgagttacccattataatgctcagcttaaggttaaattaagtgtagtttcaaaggctttcctcaacactatatattgctgtgaggtggtgggaggcgggcaggaatctgccaggaatctagtaattgtaggttctgaaaatcactcaagaaagaaagcagacgtttatggtgcactaactgccaggccccgcatcatccactctgaccctctgggtaaagtattatcgtctcttcagttaagcccattacctatatccttagccccttctgttgtcaggttaccttcatttgcaaccgagaggtggtggaatggagctacagatgatggtcccttgccctgatgccgatccgcgttcaccccagcgagtgtctcgtatcttcgtgccgtttcccttcaattccatcactaaccatggcactatacatctccatgccctcaaaaaatctcaaacatctacctacttttttccactggaaaagatttttgtggaatcagcatctggaagctaatatgtaattcttttttcttttcttttcttttttttttctgttttgttttgagacggagtctcgctctattacccaggctggagtgcagtggcgcgatctcggctcactgcaagctccgcctcccgggttcacgccattctcctgcctcagcctcccgagtagctgggactacaggcgcccgccaccgcgcccggctaattttttatatttttagtagagacgggctttcactgtattagccaggatggtctcgatttcctgacctcgtgatccgcccgcgtcggcctcccaaagtgctgagattacaggcgtgagccacgctaatacgtaattctaaagtggaactagccatgatggagatatatatatatatataatatatataattttttttttcccctgagacggggtctaactctgtcgcccatgctggagtgcagtggtgcggttcagtgcaacctctgcctcccaagttccagtgattctcctgcctcagcctccggagtagctgggattacaggcacccgccaccaggcccggctaatttttttgtatttttagtagagacagggtttcaccatgttggccaggctggtttccaactcctgagcccaagtgatccacttgccttggcctcccaaagtgctaggattacaggcatgagccactgtgccctgccgattttttttttcttaatagcagcttcttttaaaattgaatttgtatccaatcctgagaaaatgtccaatactacaaaggtaaatgagcttttactcctaaatatttgttcttatgcattttgttccttttcagttttgtatttgtagatattattttaaaaatatccactcttatttgcttccaaaaacgttgatggctactgggactggttgcctggtacaggggcttcggtatactgtactgttggcatgagcagtattatcccaaatagagtaattttttttttctgacagtctcgctctgtcgcccaagctggagtgcaatggcgctatctcggctcaccgcaacctccgcctcctgggttcacgccattctcctgcctcagcctcccaaggagctgggacggcaggcgcccaccagcacgcccggctaatttctttttgtatttttagtagagacgggggtttcaccgtgttagccaggatggtctcaatctcctaacctcgtgatccgcccgcctcggcctcccaaagtgctgggattacaggcgtgagccactgcgcccagcccttaataattataaaaaaaagtgtaatggccaaattatggttttgccacacgatgaactattaagcaagtattaaaacattttacagttaaggaaaaacccaaacatatgaagaaaattcaccctaaaataattgcttttagcttctgggattaaatggtttttttgtttgttttttgaggcagagtcttgctctttcgcccaggctggagtgcagtggcagatcttgggtcgctgcaacctctgcctcctgggttcaagtgattctccagtttcagcctcccaagtagctgatactacaggcgcccaccacagactaatttttgtattttagtagagacggggttttgccttgtcggctcggctggtctcaaactcctgacctcaagctcaagtgatctgcccaccttggcctcccaaaatgctgggatttcaggcatgaggcaccatgcagggcccctaaatggtttcttactttatactctttgaggttttaaaaaatgtaatcctagctttcacgatcttgaaataaaaacaattgttaccaattgatgagctgcttcccatcatctttttaaacctaatgtttagaaattctcaattctaattctcaaaattacttggtgtttcaaccaagtatttctattgcaaactcatggaacaaatggagattgtgataagcagatacatctttaggtctatctgtgtgggttagcagagattagtttttagtttgacaattcttgttttaatgcgaaaaagtctaaatgtctgacaaattatatattcttgaaataaaatactacacagtgcttacaaacgctgtgtaagtgtattcactgaaatgggagaaaggtcacagtatgataaagactacaaaataggatgtacaagcatagaataggatctgagaaaaatgcatctttaaatagctacttaaatagctgtttaagtgaattatgggtgattttagcttgcctgcagttcctgagttttttttccaatgtgtattaatttctcccctatgatgacacacatatttctcatccctgcatctgtccatctccccaacctcatccctaaccccacaagacttttatacacatttcccaaactgctacaacagaacagaacttccccctggggcctccatgattaccatgaatccaagtactaagtaccaagatctgtgccttaaatcctgattaacccacatttgacgcacgtcaagctcaatctctgagaagtcaagagaatgcagggttcttgttcactagtttttctaatcaaccaattgctgtctgataagaagttctcttccttatacttttagatgtctgatattggtacagccagtcaaccattctcatcactcaaaagtactgtcgactctgtttaaacggcaagatattaactttctgtactgatcccagaaaacatgcctcaaagtggcttttgagacaagatctttgtaccccaggctgcagtgccatgacacaatcacagctcactgcagccttgaaatcctgggcttgtgatcctccttcttcagcctcctgagtagctgggactacagatatgcaccactatgcttggctaatttttaaaattttttgtagagactgggtctcgctgttgctcaggctgattctgaactcaggctcaagcaatcctcccaccttggcctcccacagcactggtgtgactgccacatccagcccccaaggtggcttagttaaaaaaaattttttttttcctttgacagttgaagtcggtttatcataaaaatatgtgtcctggccaaggcgtggtggctcacgccggtaatcccagcactttgggaggccgaggcgggcggatcatgaggtcaggagttcgagaccagcctggccaacatggtgaaacccagtgtctaataaaaatacaaaaaaattagccgggtgtggtggctcacgcctgtaatcttagctattcaggaggctgaggcaagagaattgcttgaacctaggcggcaaaggttgcagttagctgagatcgcaccactgcactccagcctgggcgacagagtgagactccgtctcagaaacaacaacaaaaggtgttccttcctgtgggtaggatttaaaagaaaaaaaaaaaaggaaaatgggcagccttagggctagcaaacacccaagtaataggtcagatttaacaaggcaaggctcgctccaaaaaaactgtagaaaagcctaacggagtagttcaaggcaggatcttaaagtacttctgttatgcttttctacaatgtttttggtattctataagccaaaaccctttacctgttttaatttgtaagaaaaactagtgatttctttaaatatatcattacaacgagtattcaacgattaagaaaatctgtgatttgaaaacatctattaccaccgtccggggtgggaaggttggggatgacaactaactaaacactggcagatggttctatggttaaaaggcttatcaaaaactcatctattctacctatacttcagagttaaaggcaaatctgttcatcaccgtttcaggcctccatcgtgtaatgaccaacagcgctcaggtggctcctagtccttccccatcccccaagggttatcaaagcttctttgccgtcagttcatgacacatcactatcctctgcatttgcttttactgtatcctcactattccctataaactctgctctggcagtccgtgcagagatctatgatcccatagggcttgtttttaaaggattcttgcctactgatcagcccacaggcaaaacaacacaccaagtgtacagaggtttaaattctgttccaaggatccctatttagtgataacctcaacaaggtctgttctccggccgttttcactgttgccaagtcaagagttgccccacaccacctctgaagactatacttaagagggcagaatgacaacagaatgtatatgaaagcaaatctggaaaatacataccatactagatttagttgtagcttctttttttgggacaagtttcacttgtcacccaggctggaatgcaatggcgtgaactcagcttacagcaacctctaccacctgggttcaagcaattcttctgcctcagcctcctgagtagctgggattacaggtgcccaccaccaaacccagctaactgttttatttttagtagagatgcggtttcaccatcttggtctcaaacacctgacctcaggtgacctacccacctcggcctccctaagtgctggcattacaggtgtgagccaccacacctggcctatctgtactttttttaacctcatacgaagagttaagaattacgtatttgctttgattcaaaggatattggattgtttttcccttaaaccaatatagtcaagcaacttcaaaggacatagatactcaagcagttatgtctcaggtatcaaccaacaatgaaccacataatggtcccatattatatactgtaccttctctttagatacacaagtacttaccattctattacaactccctatagtatttacataataacatgctgtacaggtctattgcctaggagcaataggttaaaccatacagcttacataggtaataggctatgccactgaggtttgtgtaagcactctctatgatgttcacgcaagaaaactgcctaacaatgtgtttcttagactgtatccagtcagtggtgacccatgactgtattaaacaaaaattcaaacatttcacttaaaaaaaacaactttggaagatcaaatatggaatttttttttttgagacagggtctcactctgttgcccaggctggagtgcagtagtgcgatctgggtgcgctgcaacctccacctcccaggttcaagcgattctcctggctcagcctcccgagtagctgggattacaggcacctgccaccacacctggctaatttttttttgcatttttagtagggacagggtttcaccatgttggccaggctcaaatgtggaaattctgtaaataaaatttaaaccagaatttaatccatgtgcttcaaaatattttcataactgagattttattggttgaggatcagtacagacatttcaatttgtacacaaatcttaacatacgtaacgaaattctaaaaagccatgtattgtaattcttttttaaagttattccagtgactttccagcttaaaatttggaagcaaattttccttaagaggctatcaagtaccagtatcttcacgttggtcagctgttacatacggcccaccagttcacaactcaacagcacgtacactacatgttcaaatctgtaatctttcacagcacagtaacaaagttattaggaaaacaggactaccacaaagatgttacagagtgcacacaattctggcagagagagccatgatcaaagagtggttttctttaggaaacaattctactaaaaaacaacatggtaatagaagtaatttaaaatgttcaagacattaaatgcaggactgactccatattgccatttaatatgctttgtattataggatataaaaactaaccccccatctgtggaatgttaagctgacacccgagacagtcagagcctcccataattcaatatcccacactattttctggttgtaccaaaaaataaacaaccagcaaatgatttcacctcttaaaaaaaagcatttacacttaaaaaatgggatgaggtgggattccctccttcttaaaaatgtttctagagctactaaaaaacttgcatttacaaaatagttgataaaaatattcctctggattgtacaagaagggagacagggaccactgataagacatggtatatggttattaatcagacttggcttctttctctcctgcttcatcagaggctggactctgcaaaagaaaggaaattgagatctttagcatttaacacgttgtcgttttatttatatgcaactatcaggtctttaaaaaagtcaataacctttgttatttgtaaagtcacctacctactcttgttaaaaaacttttgttaaccaccccctcaccccaaatcaatacttgcagcccttccatggtcatgtgcatgcatctacagagcaggaaaaaatgttgagttgcatcacatgtacactccaagctgaggtcactctgtcttcttgtttcagctctaatgccgtaaacaactgtttttccggtctacttagtgccacatattttacacctttgtgctttttactgatgattttgttgtttaaaatggcccccacgcatcttgttcaagtgctatctaatgttgctcaattcaaggctgtgatgtgccacacagagaacgtatgtgttggagggctttgttcaggtacaaattacagtgctactgggtagtgagttcgatgtgaatttaacatacattaaggcatgtctaaacagaaatacacatgtaacaaagtcacgtattttcagttgatgaaaatgttgtgatcagaggtttgtaggaacccaatcctgtacttcccctatgtgaaaacggtttcatacttgtggcagccttatattaatagaacacagctataaacaagggaaaccaactgtaatttgataacatgtactagaaggtcaagttcttcctttaaaatcaaaactagattagcaatgtgatcttattatcacacagtatttgatgtatggttagaattaagtagtacaggccaggagcggtggctcacacctgtaataccagcactttgtgaggccaaggcggacagatcacctgaggtcaggagtttgaaaccagcctggctaacacggcgaaaccccgtttctactaaaaatacaaaaaattagttgggtgtggggatgcacgcctgtaatcccagccgctcaggaggctgaggcaggataatcgcttgaacccgggaggtggaggatgcagtgagccaagatcccaccactgcactccagcttgggcaacaagagcgaaattccgtctcaaaaaaaaaaaaaaaaaaaggaattaagaagtacaagaagtacaagttaaaaaaataaactgtgattataaatttcttaacttaggaataagtagtttataacttaagaatttgataaatatcaaatataaacatcaaatacttaagtgatatcaaaatttaaaaatcaatatactaaattacttatcttttctagcttagctaatataacaaacataaaataaaggtctggcttaactgaatcttgcagttcagttattttttaagaaacagcttccaggctagaggagtgcagtagtgctcacaacaaatcaatcaaaacctgttacagacttctttgttccttctctactcccactgcttcattaataaaaaaaaaaagacatcttttcctcacagcttaaaacaataaagattcagcctggctaacagacactgtctctaagaataaagattaatgacactagtctttttatttacttgatctatgttattatttagacctttaagaaaaatacaaacaaaaacattttcattagaaatgaaagtgggaaaaaaatgccaggaaaaatgcaagtaaggggaataaattttcaaaaatatatttaaaagcaacatccagaatataaaaacaaaacaaagattgaattatatctgaaattgagcatattaaaatttcttgctcttaaataagccatttacatatttactttccaataacataaatcatagaaaaccatttgtccaatcactttgggataccgtacaaaactttgttcaatattataatgaatactgttatctgctacaaaaaatgtacaatttagtatctactgttcagagtcaaagcaatcacacacacacacacacacacacacacacttctgacctcctcagtcttcgtttccccgttttccgcaggtaagtcttctttagtttcttggttagccacttcggcctgttttccctttgctccccttttcccttttgtttgcacttttttgtctgaagatttatcctatgatagaataagaatatattttaagtacatgctttactccttatttacattttgttttactttttccccttcatgtcagacaagtaatgtgcccagtggtgctgacttcatagtaaggtttgagagagggacatctcacacatgagcgtgaaaccccaatcttcaagcttatgaaaggatctcattttgtatagactgtatccataacagctgtcatattaatgtctatcacacatcagttgatacacctattacatgagacaacttaaggtcccccccagtaatcaggaaaacaatgtatgctaaggagattttaatagtacttgcatgtcaagcctcattagacatatgacaaatcctaaagcccgagctatatttcaccactgtcgccatcatccactattccctacagttccacatgacaggacaatgtcatgaagttgaataccggaggagtctcgtcgaccgtattcccacccatccccaaatttgttgtgaacttcaacaatactgtcctcacaagaccttaaccctcacattaagaccaatcacctgaaaaaaagcaccatgccgtacggtcaggttgactatcctgctacagttaatcccttcatatcatataatgaggaactaaaaggatcagttttgaatttatcactttcatttaggtgtttgaagaatctgaaaagcacaggtattaatatgaccatactaacttgatacattaagttcaaaatttaagccatgttaaagaaacataaaaatacttttagataccatccatcaatactgagaagaaagcttaacatttattccttgttagtaagtatacagcagcagctaaattagtttagcccccagcgggtggtataaaagacccatacggatactgaccaattacttgaattaaagggccataaagacaagcaagtagagctcacaacttcaatgctaacacgggcggaaaaatcactgcagggtgttctgtactaatagtaggattccacagacagcataatgacttttaatacttcaacatcctttgagtaacaaatgataaatgtatttgagacaaaactgctactacacacattgctatcacaaagtttcacaatcacttctgtatttaagaactactcttttgtagtctgtttctaaagatttctcattaatttcataatcattccaatacaaaaaatacaaaactgggaaacagttaaaatagaatacataatatcttggacttgaaataataccacgtgtaaccattatcagctgaaaagctagattaaaaaaaaatcaatcaagtttcccaaagtataatgtttggaccttcaaaatatttagttctagggaaagatacaagtcagaagcacacacagtgacaagatatgccttgaaaacatgtctactgtgtagtatgataatcgatacaccaagtgcttacgttctgtttagacttcaaagtctgatcaaccatgaagtcaaaggtgtattacagaaacgagatgtaaaaatgaacaaatcccttctgccctttttccttttgggaaaactgacctcataggctcgttcctcaacaaacactgacatgaagacttacctgttggcctctcaattacatctgatgtcccaaacccactgagagtaaaacttggaactgttttcattaaaaaattcactttacagtagatctcaagatggacaaagataaataaggaaagaaacaagaaaaatgtaaagagggaaacaggcagatatttcagccaattagtttaaaacacacacacacacacacacacaataaaaaaagataggtaataatatactgctcacgccaacatttttaacaaggtcagctaattttttaggccttcaagtttccgtgctgttctaactgtatacagagaattaccacatggtcttctggtaatgagaaatttaaagttgaaaaatactattctcataccttccgtgaagctttatttttaaaaggatcacaaaaacagaactttctgttaaagaaaacatagttaacatttttacactcagctctgtaaaaaatttaaattaaaaaagaaaaaacatctttgttttatacctttatttaacaaggacaaatttagtaattatccaacaactcctcaatgtcaaggaaattaatcttgcctcttctgatgactgcagtgctaaacttctacctacacttttaggaaagaggtgaaggcattaacaaaaattttttttgagacttcaaatagcaaactctcacctaagttttggataaaaattaatcaccccgcgaagaacatgtagagctttacaggtttcaatgctatatccaaacacaaagcttatacttgttttacacatgttctgcttttccaccctgcaagttatcaaacacacgtacacccaaagccaacttcattctacagacctgcaattcgaatcatgcaatcacgaatttgttagggagcagccaaaatcacggttttgtataactgctgatgaacacttccagagtagtggcggttattttctcagagatcacaactttttacctccccacccccaccccgtaaaaaggttaaggcttcccgaagttggcttggaaactgtatatataaaaacttacacgttccctttctcctggcctcggtgctatcttgactcttttattgtcaaaaaaggaagtacaagcacgaattaaaagccaagcaccagccacaatgtacgcaacgcaaagaataaatttcctttgtagacttaatatttaatattttttgtcgtcctaagtctcctaacatctgcagcagcattagtgtgatatagttctataaaccaggatgaatatatccattacatttttgcctcgaccactagaaaaattatttaccgtaattattaaagtataaataaagctccaatagctaatcaaaatggaagccccgcattaagaagcagtgtagcctaaggccccgctgcatcccaatgcgcgtttcgaggcttaccttcgctgctgcctttttcggcttcgcttccacttttgcaggaggtttctgaaaggcaaaagcagcactgagcgtcctcacccgggacgacccgcggaaaacgaacggttacggggctcgctttacttacagctgacaaccgcgccgatctcctcttgggcttggagaaagaaaaaggagagtcagcgagaagagaaggcaggccagcggctcacgggaaacccaccaccccccgcagaaggcccgcactcacctcttccttggcggcgccttcggcggagctgacctgcggagacggagacgcacgaatagaggcgggccgcagtcccaggactcgcgggcccgcccggccccgagaacaatgcccggccgcgtgacgtcacggcttcccgccgccccgttcgaatagccccctcagctcccccggccgccaaacgttccagaacgcccgcccccgcggccgccgagcgctcgcctgcccgcccgccggtctccaagcgcctcccgggcccgtcgccaccgtgggtgcaacggggcctgggcctcgcggggcccggcggggcgccggcggcggctccagggggcgtgtgcgggccgcggccgccgctcaccttcctcttgggcatcgtggcggcggggaaggcgcgtgccgggtgcctgcggggaaggcgcgtgccgggtgcctgcgggccgcggcgcgccgacagccttcgcgaaactgggctgccttgccgctgccactcctcccgccgcccgagctgctgagacccacagcgggggcggtgggagaaccggatggaaccggattgggagcccgcctcctcctccccccgcgtccccggccgcgggctccccctccccgccggccgggccgccccccacccccgcccattggctacgggactcagcccgcgcccggaataggtgaggcgggcccttaattgatcccggaccccgcccccttccgggggccccccccccccccccgggcgcccccacccctttccgccgtctcgcggggccccagacccaggcgaagggggcggggtcccagtggcgctccggcctcacggtagtttgaagccgagccgcaaagtgcggtctgcgcgctgattggcggacgcacgtcacgggaccgcgggtccccacccacaattcttctggatacctgggcgccttcaggccactggtatctggcccctcccctccggggtgaattgggttcgaacatttatagttcgtatcttagactgggaagggagaaggataaggtatacaggaagtagcaaatttctcccgcctctgtcggcaagaaaggctatccaggggctccagcttcgcaggcctgcgtgaagcgggccctggtgcgcaggcgctgcaggagggcgtgggaaggagagccgacgcggcctttctgtgtaacttccttccttccttccttttatttgagacagggtctcgttgtgtcgtccaggctggagtgcagtggtgcgatcacggctcattgcagcctcgaccccttcggctccagcgaacctcccactccggcctcccgagtagctgggaccacagggcaccattttgcccagctaacttttgtattttttgtagagagggggtttcactatgttgcacagcatggtctccgactcctgggctcaagcgatcctcccgcctcggcctcccaaagtgctggggatccaagctgtggaactttcttcagatttccctggaggactgcaggtgcacgagggtcgtttctgggcccagagtagggcagctctcagattgcagctcctgagagccgtgcgcgaccgtctccagcactcgcggacccccagagggctgtttttttttctccatagcattgattgaatatatatccttatacattccatatatatctcaggaagaatacacaaggaagtggtaccagcggttgcctctggggaaaagtgggaagattgagggtaaaatttcccttttctcgtgtgtaattttttttcactttcctatctgcatggattaccttaaaaaaattcaacatcagagagtacccaagtttgtggcacaagcatgtactgagcacctgccctgtggcaggcaccgtgaagtccctggggtagagagaatccaggtttgtatcccaagcactgggtctagtaatttagtggggagagaaagtacccaattggcctagtaaagaaaggggaagccatcggcagggggggtcagcatatttcaaggcatgctgacttgctagagtgtggcagcccaccaagacctttaaagtggcagggatggagatacgaaaaatggacgtaaagatcagggaaaagaggcagaaaaaaagaagagcagcccgtcatgaagttcgatcattatccaaagattgagggatactgcaaggtcttaagcaagcgaactctatgcttttggacttacctcataaagaactttctcccataagaaccgaagatgcgctaggccagaggtgacaactgatggtccacagatgttttatttggcctagttttttttaagttgccaacacaaacaaatggagcagccagaactcaaatgaaaaactatttggcagtagattccactactcatcagcatgggggttttgacctgctccgtttctgacctgaccccttcataggcaaacctgtgggtcttttgctccgtggaaagtcaccataatgatgctaacgacctgatcagcataacacactatagcccagaactggattcaagcaatcctcctgcctcaggttcccaagtggttggaactacaggcatgtgccaccatgtccaattggcagtatgttttaaacctaaacagacactttcaggactcagtcattccactcctagaaaggtacacaacaaaaatgcttatatattttcaccagaagacatgaaatagaatatttgtagccgaaaaatttgttataagcccaaacagagagcaacctaaacgccagtcaacagaagaatagatgaataaatggaagaccgtcagcaatgaaaataacccatatgcaactacatacaacaatgtgggttaattttactagcataatgttgagagaaagataccagatccaaaagtgtgtatactgtgtgattgtattcatgtaacgtacaaaagcaggcaaaactaatccagtctgttagaagtcaggttagtgcttcctggttggggttgaggtggggagctagcgactggaggagagagcaatggaaaaatttgaggggctggctattcatgctcgatttcttgatctggatgttggttgcactgtgttcacttcatgaatactaattgagcttttcacctatgtatacatttctggatatatataagtttttttttgttttgttttgtttttttgagacggagtttcgctctgtcacccaggctggagtgcagtggtgcagtctcagctcactgcaagctccgcctcctgggttcacaccattgtcctgcctcagcctcccaagtagctgggactacaggcgcccgccaccatgcccagctaattttttgtatttttagtcgaaacagggtttcaccgtgttagccaggatggtctcgatctgctgacctcgtgatctgcccgcctcagcctccaaaagtgctgggattacaggcgtgagccatcgctcctgtcctatagtgaagtattttttcaacatgtcagagtcagaaattttcacttacaaatttagctcttccacttctcttggcgtcctttgggcgtgcgttccacagactgcacttgaccttgtatcttgtaaggaggtgttctttctccagctgccaaggttccagacctgctgatttcactcctttgtatttcctactgggcttctggaggaattttagtttgtgatgcccgcatatatgtgtaggttatatatagatatcaccttttacattttcatttagttttggacgatgtgtttctgtgattcaaattccaaagattccattctgggcaacaacacaagaccccgtctctacaaaattaaaaaaaaaaaaattagctgggtgtgtggcacacacgtgcatttccagttactcaaaacgctgtggtggaaggatcacttgagcccaggaggtcgaggctgcagtgagctatgattgtgcagtccactgcactcaagcctgggtggcagagtgaaatcctgtcttaaaggaaaaaaaaattccaaaggaacaaaaaaatttccagagaagtctgccttctgcttctgttccccctggctatctacttctaagaagaaaccaatgttgctgcttcttaggtatccctcttgagatattttgtggaagcaaattaatatatgttcttttcttcctcctttatttttacactgtttggtacccatgcattttcacttaacaatagagattgttttttatcagttctttacaaattattctttttttgtattactgcattgtattccaccatatagatggaacaaacattgttaaaaattgtgacaaagtacatataacatttatcacctcaaacattttcagtgaaaagaagaatgaaaatgagtgaggaaagtttatgaaacttatgggacaactcaatgcagccaatatgtgcgttatgggaatccaagaaggagcacagaaagagaaagggatggaaaacttacacttgaggaaataatgacagaaaaattcccaaatctggagaggaaaacaaacatccatccccatgaagcctataatactgaaaatacttgagcataatgaggttcttgagacacataatcaacttgtcaaaagtcaaacacaaaggatcttggactgagcacagtggcttgtgcctgtaatcccagcacttttggaggctgaggtggatggatcatttgaagccaggagttcaagactagcctggacaaaatggtgaaaccctgtctctactaaaaatacaaaaattagctgggtgtggtggtgcatgcctgtaatcccagctactcaggaggctgaggcacaagaatcgcttgaacctaggaggcgaaggttgcagtgagctgagattgtgccactgcactccagcctgggcaacagaatgagactctgtctcaaaaaaaaaaataaaaaaatcttgaaagcaacgtaagaaaagtgactcatcacatacaagaaagccactgtaaactataagcaaatttttcagcagaaatcttgcaggccaggagaaagtgggattcaaagtgctgaaagaactaagtactcttagtgccaggaaagaatactatacttggcaaagctgtcagaaatcaagcagagatagacttcccagacaaacaaaagctgaaggagttcatcaccactagacctgctttagaagaaatgctaaacagagttgttcaagttcaaatgaaaggatgctaattagcaacatgaaaacatatgaaggtataaaactcacgggtaaaggtaagtataatcaaattcagaatattcatactgtaatggtggcatataaattttaattctagtataaaaaaagacaaaagtattattatataactataaaaattgttagtgattacacagtataaaagatatacattgtgatatcaataaaataaatgtgggagggaagaagtaaaagtgtagagctttttttttttttttttttttgagacggagtctcactctgtctcccagactgaagtgcagtggcgtgatcttggctcaccgcaagctctgcctcccaggtgcacaccattctcctgcctcagcctcctgagtacctgggactaccggcacccaccaccacgcctggctaattttttttgtatttttttagtagagacggggtttcaccatgttagccagcatggtgtcgatctcctgacctcgtgatccacccgccttggcctcccaaagtgctgggattacaggcatgagcactgcgcccagccagaacttttatatgcaattgaaaatatcagctttgactgttataagtgtaagatgttttatgtaagcctcatggtaatcacaaagcaaaaactggtagtagatacacaaaagacaaagataaaataatcaaagcatgccaccacaaaaatcatgacattaaaaggaagtagtaagagaagaaagaaacaaaggtggccaggcgtggtggctcacgcctgtaatcccagcactttgggaggctgaggctgacagatgactggaggtcaggagttcaagaccagcctggccaatacagtgaaacaccgtttctactaaaaatacaaaaattagccaggcatggtggcacatgcctatgatcccagctactcaggaggctgaggcaggagaatcactttaacctaggaggcagagtttgcagtgagccgagatcgtgccactaccctccagcctgggtgacagactgagactgcatctcaaaagaaggaaaaaaaaaaacaaaggaactaccaaacagaaaacaatgaacaagatggtagtggtaaatcctcctatatcactaattaccttaaatgaaaattgattcatttctccaatcaaaagacatagagtgagccaggcatagtggtgtgtgcctgtaatctcagctgtcagctgcttagaaggctgaggcaggagaatcccttgaggccaggagtttggggctgtagtatgctgtaagtgttcctgagaatagccactacactttagcctgggcaacatagtgagacttaatctccaaaaaacaaagacatagaatgactgaatgaataaaaatttaaagatagacataggctgaaagtgaagggatagaaaaagatactccatgcaaatggtaatcaaaagagagcaggagtggttataccatcaaaaaaatatactttaagtcaagatgtcacaagagacaaaaaagatcattgtgtgatgaagggtcaaatgatcaagagaatataagaattgtaaatatgtatgcaccctacattagaacacctaaatgtataaaacaaatattaatggaattgaaggatgaaatagacaacaatacaataatagtgggaaatttgaatacttcactttcaacaatggatagataatctagacaaaaaagagaaacagtggacttgaacaaccactataaccaatagagcggacatacacagaacattccatctaacagcagcagaacacacatcttctcaaatgcacatgtaacatttcctaggatagatcatatattgggcagcgaaacaaaactttccttttataaagtttaaacaaatttaagaaaattgaaattattattattattttttgagacggagtctcgctctgctgcccatgctggagtgcagtggcacaatctcggctcactgcaatctctgcctcccgagttcaagtgattctcctgtctcagccttccagggaggctgggattacaggcatgtaccaccatgcctggctaatttttgtattttttagtagagacaggatttcaccatgttgtccaggctggtctccatctcctgacctcaagtgatctgcccgctttggcctctgaaagtgctgagattacaggcataagccaccacacacagccctgaagattgaaattatatcaaatatcttttttctcaccacaatactatgaaactggaaatcaataataggaggaaaattgaaaaactcacaaatatgtggaagttaaatagcacactcctaaacaaccaatagatcaaagaagaaatcaaataagaaaaaaaatcttgagacaaattaaaatggaaacacaacataccaaaacttacgggatgcagtaaaagctgttcaaagagggacatttattgcactaaacgcctacattaagaaaaaaagaggtcaggcacggtggctcacgcctgtaatcccagcactttgggaggcccaggcaggcagatcacgaggtcaggagattgagaccatcctggctaacacagtgaaaccccgtctctactaaaaaaaaaaaaaaaattagccaggcatggtggtgggcgcctgtaagtcccagctactcggtaggctgaggcaggagaatggcgtgaacccgggaggcagagcttgcagtgagccgagattgcaccactgaactccagcctgggtgatagagcgagacttcatctcaaaaaaaaagaaaaaaaagagatctcaaacatcttaatattcacctcaaggaactaaaaaaggaaaaacaaaaactaaggttagcagaatgaaggaaataataaagatgagagctgaaataaatgaaatagagaatagaaaaacaatacagaagatcaatgatatggccaggcgcagtggctcactcctgtaatcccagcactctgggaggccgaggcgggtggatgacgatatcaggagattgagaccatcctggccaacatggtgaaacgccgtctttactaaaaatacaagaattagctgggcatggtggcgcgcagctatagtcccagctactcgggaggctgaggcaggagaatcgcttgaacctgggaggcagaggttgcagtgagctgagatcgtgccactgcactccagcctggaggacagagtgagactccgtctaaagaaaaaacaaaatcaatgatagtaatagttggatttttaaaaagataaacaagattggcaaacctttagctagcctaaggataaaagaacacgcaaatagataaaattataaaagaaagaagagacattacagcagataccacagaaatacaaaggctcataagatactactattaataattacatgccaacaatttgcataacctagaagaaatgaatagattcctagaaacgtacatcctaccaagactgaaccatgaagaaagaaaaaatttaaacggatcaatatgggtaaggagattgaatcagtaatcaaaatctcccaatgaagaaaagcccatgatcagattgcttcactggtcaattttaccagacatttaatgaagaattaatgccaatccttctcaaagtcttccaaaaaactgaaaaaaaaggagcgtttctaaactcattttatgagcccatcattgccttaataccaaagccagccgtggacactgtaagaaaagaacattacaggccaatatccctgataaacataaatgcaaatagaatctaagctggtggaaaagtaattgcggtttcagaccatgaattttaaataattataactaggctcaaacacatctttgttaatcaaaataggaaccattacaatcaacacatttttgccaatgagaaacaagtttgtcattcctttggtgtaaaaaatccatgctttgggattcggtgaactcttggaaagcattttctgcattttgctggttgtggaagtgtttttcatgcaaaaagttgtcgagatgcttgaaggagtggtagtctattggcgggaggtcaggtgaatatggcggatgaggcaaaactctgtagcctaattcattcaacttttgaagagttggttgtgccacgtgcggtagggagttgtattagtccattttcacgctgctgataaagacatacctgagactgggtagaaaaacaggtttaattggacttacagttctatgtggctggggaggcctcagaatcatggcgggaggcaaaaggcacttcttttttttgtttgtttttgtttgagacagagtatctctctgttgcccaggctagaatgcagtggtgtgaccccggcttactgcaatctctgcctcccgggttctaagcgattctcctgcctcagcctctggagtagctgggattacaggcacctgctaccatgcccggctaattttgtcttttttttatttttatttttatttttttttttagtagaaacagggtttcgccatgttggccaggctggtcttgagctcatgacctcaagtgatctgccctgcttggcctcccaaagtgctgggattacaggcatgagccactgtgcctggccagcacatttttaatctaattaggaaacaactaaattccacctcaactttagattggacttgggcagaagacagctgtaatcccagcactttgggaggctgaggctgacagatgacttgaggtcaggagtttcagaccagcctggccaacacagtgaaacaccatctctactaaaaacacaaaaattagccaggcatgcttgtgcatgcctgtgattccagctacttgggaggctgaggcatacaggtatcaggtgaagcacctctatgttttgaaaggcacaataatagtcaccaccagactagaacctgtgatatgggatttttgccacctcaacaatgtagtgagacccttttattagcagaccagatgtggatggtatggcaacataatttgccaaaaatggatgcctacccttctccttggggatggttatgggcttgcagaactcatggctggccgtacttaccttctaactggaccggaaggtgtatgtgtggtcaccgttatctcccgggatgtatcctcaccaaattggactctctcccatctaactgggaaattgtaaaggctcgccataggcgacaaaaacaagcatcttggtggttctaccccatggctatgttttcctcacaggcagctaccaaattacaagctgaagccttagccgagcacacggttgcagctttcagtaatacatgccatgctgccatgcccttaccatcctgaggaaacttctcagattaggcaggtacccttacaaaaccgtatggctttggacattttaacagccgccccaggaggaacttgtgttttgatcaaaactaaatgttgtgtgtatgttccagactattcacataacgttactcaggctatgaaagctttagacactcatatctctgccattgatgcgctatcagtcgaccctatatcggcttagttccaacaactgcccagttcttagaaggcctttctgtttagtttacttggaattattttacttattttgctttgctattgtggaatatattgcggttatattcttcgtgtaggaatgcaagacaagcttacttaaattggacccttattaagcttccagatatgaccttttgttggaactcagagttatgaacacccctcatcatactgatgctttctgactgagctcctctctaccctgaatgcaagagacccaataattaggcaggaatatcgtcacccctattcagcctgaaggagttacagaagacagatctttgtccctctgcaaactttagggttaagggtcctcttgtaaagggaggggagaaatatgtcagaggcgtttgaaccagagcgactccatcttgagggctgtgtaaaatgaggctgggacatgctgagctgcattcccagaaagtcaggtatttctagcctctagatgtttacggttaaaggaacagattgataatgtttactaaagtgacccagacttaggaatgtcctgatatcccaatatcttgagaacagaagcgttcctaattttgctttaaagataataatatcaattcttgcaaaatgtagtaattaggaaaattaatcatttatcacaaatccttgtagcagagcacatctccccatgatctttttttaatcctatctataaataagtattgtacctaggatggacacattcctcctctggtaacttccttctttcctttcttttttttgagacagggtctctctctgttgtccaggctggagtgcagtgacgtgatcatggcttactgtagcctccaacctcctgggctcaaataattctctcctttcagcctcctgaggagctggactataggtgcatatccctatgtctggctaatttttaaatttttttgtggaaacagggcctcactatgtcgcccagcctagtctcaaactcctgggctcaagccatcgtcctgcctcagcctctcacggacaaatgattttccatttttaatagagggattctcgctctgtcgcccagactggagtgcattggcgctatctctgctcactgcaacctctgcctcctgggttcaaggaattctcctgcctcagcctcccaagtagctgggactacaggcgcacgcaaccacgcccggctaatttttgtatttttagtagagatggggtttcaccatattggtcaggctggtctcaaactcctgatctcaggtgatccacccaccttggcctctcaaaattctgggattacaggtgtgagccactgtgcccagctgacaactaatttttgacaaggacacgcaatggggaaaggctgaagcggggaggattacttgagttcaagactttgagaaaaccagcctgggccacgtaaggaaacccctatctctttttaaaaaagtattgtatactaaaagtttgctaagagagtggatcttaatatgttaagtgtttttgtcacaaaaatagcagagatcataataaaggaggtgcagtgaaactgcgaggggatgagtatgtttatggccatgatggtgataatggtttcccaagtgtatacttatccctaatctcatccagatgtttacattcaatatgtatggttttgatatgttaatcatacctgaataaagtggtttaaaaagaagagttggcagggtgcagtggctcctgcctgtaatcctagcactttgggaggccaaggcaggaggattgcttgagcccaagagttcaagaccaatctgagcaacacagggagacccctgtctctacaaaaagtagcagaacaaaattagctgggcatagtggtacgtgcttgtaatcacggctactcaggtggctgaggctggagaatcacttgaacctgaaaggcagaggttgcagtgagctgagattgtgccactgcactccagcctgggtgacagagagagatcctgtcccccctaaaaaagagtcaagcttcctgtcctcatagaacttgtgctctagcttgagaagacagacaataaaccagtaaacaggatactttgacatgccttgaaggaagaaaacgcagagtttagcctgagaggttgagatgtaggatcgggttatcttgagacagaggagaccaggggtacatagtaaattcacttaggcaatgaatgactcggatcttggctgtagggatggggatcagtggtggtggtggtgaattggggatatattttggtggggactgacaggactcttcagtgaatctaatgtgagacagagcacagagacttttggctgtgagcaatagaacccaaattagcatcaaccacgagaaaggagatcatctccaacaatagaagatggatgtgggattcataataggcttgccctgggtcatagatgcagcagcttaatgggttatcacagtcccaagttatttttttttcttttttgagacggaggttcagttttgtcgcccaggctggagtgcagtggcgctatcttggctcactgcaacctccgcctcctagattcaagtgactctcctgcctcagcctcccaagtagctgggattacaggcggccgccaccacacttggctaatttttgtatttttagtagagatggggtttcaccatgttggccaggctggtctcaaactcctgaccttaggtgatccacccacctcagcctcccaaagtgctgggattacaggtgtgagccaccacacccggtcccagtttctttttttcctcttttgttgtgcctctttctgagttggcttctttctctgtctgaaatggaaattctaggtgtcatatccagattacagcatccagacaaataatgtctcttttctcagagtgtcaatcgattggctttttttactgcttagaatgtagtcacagtcagggggactcggataccctttggccaaatcaggcccacccctggagttgggccaggagtggagacagtggaaacctgaacaaaatgagggctgtgtcacaaaggacaaggagaagagttgatgtggcctggtattcagcagtatccgccaggctgtgtggatggggagccatttgccctgccagggatgcagagagtttgagaggaagctggtaggtctggtgttgatgcattacattttgggaaacatccgggtccggtaggcagttgcagctacaggcctggagcttaggaggaaggaaatatttgaaagaaaagagatgttcgggcgagagctgaaacctcaggcgtgtggatgggtcaaatggggaacataaaatgcctacacctggcaactagggatgtcacccatcgtcctgatgaagcagtttcagtgagtggcagggcagaaacgaagccaacggaagagagtggaagggaaaggaagaaatgggaagagctctggatcctacactgccgtgctggaccacactgtttcacaggaagcccagggtctgagctggtttgtccacgtgatgaagacagaagataaataggggtaggtgtgacccaagcctgtgagccaaggagaaggtatgaagggaggtgatggtcagaacatgtgaatgctcagcgctcatcactgtattggatatccaggctgctgcagaaggatgagaagcaaaggatgcaaatgagagcaaaaacacagggcttgacacagcttgtctatcatcactatgatggatgagctggccagtgacacccaaacacaatatacacatatagctcaccgtgcagcatatgtttctagcctgtttccaaactttatggatacatgactgtgtaattaattgtcattagatacgatgattggatttctgttgttacatgtatccctctaacagtccacagtgctgattgttattttaaaaagaacacagaggggcgcggtggctcatgcctgtaatcccagcactttgggagcctgaggcgggtggatcacgaggtcaggagatcgagaccatcctggctagcacggtgaaaccccgtctctactaaaaatacaaaaaattagtcaggcgtggtggtgggtgcctgtagtcccagctactcaggaggctgaggcaggagaatggcgtgaacccgggaagcggagcttgcagtgagccgagatcgcacgactgcactccagcctgggcgacagagtgagactccgtctcaaaaaaaaaaaaaaaaaaaaaaaaaaagaacgctaagccagccataaattggccacattgttctctcctaatcacaaatgaggcctggttttccaaatatggaaaggaaaggccccttgcttctctcccatatggctcagcttttgtggcttcaaaggataatcactccctctaaggggcagccatttaatattcaagacatgagtgaaaccccccaaaacctactcaaatattaaggggcacttgttctgcctgactcttgaaatcacatgaacaagctaaaggtttccctgtctcgggtgagctataaaagcagaggcaatggtacagacatgtgtatctgacatagcctgaggggcgatcccttcttaagcctgcaggaggaagctgccttaagtttgattagatgttgccctacgtctgtggtttggagtgttggccaggataataactaaaagcagaaaaaaatgtcatctaaatgctacttttacatttttctttttttgtttttgagacttactctatcactcaggctgaaatgcagtggtatgatcatagtcactgtaatttcaaactcctgggctcaagagatcctcctaccttggcctcccaaagccctgggattacaggcatgggcttccgggcccagccaaggtctttattatgacaggattttgcatcatcttcttgttggttttattgatcatatttgcatgctgcaaaatgctttttccatggcactctgccatgtggtcagctcaccaccctgaactgtgtgtgaagtaccataaatttaggtttgatccaaaaaggactctctcattatcaaaatgtgcctgttatgttgcctgggccagcgaagctattctttccattaatagctctaaatggaatgagaaatcttagacttgtaggttagtctattttacttgtgtgtttattttgaatactttcaaaatgtttggtgaaacttaatttggaacattccagggtgttctctcatctctgagccaacctataaagaaaagaggagaattgtctcttcagtgtatcactcgtggggctgtaggggaggcaaggagatcacaggttgcatttttctttggaaattttctgacacagacctattaatcagtctagcctattttttccatgggagtgagatgaaaagaatgaagtatatgaaatcccttattaacccttgcatgctcaatctccacactagatcagggccttctgtatttaataggattccatactacttttttgttttgtttttgagatggagtcttgccctgctgcctaggctagagtgcagtggtgcaatctcagctcactgcaacaacccctgcctcctgggttcaagcaattctcctgcctcagcctcccgagcagctgggaggcacatgccaccgtgcctggctaatttttgtatttttagtagagacagggtttcaccatgttgtccaagctggtcttgaactcttgacctcaggtgatccgcccacctcagcctcccaaagtgctgggattacaggcgtgagccaccacgcctgacttacttttttgaaaaagtcttaaataatgcacacaccccatttttatttcatgcgtatccttcctttgttttatattatttacaaacaatataatgtgcatctgtaaacctatcatccaacttggagctaggatgtggacagttaccaagataaacttatgtgtcccttcaaaatgctttgcatgcttataattgtttacagtacttacagttgtttagttaagccataagagaacaaggtctgggcatatttggttcatcatcatattttactctgcagtgagtgaagtatctgatacctaaaaggctttaatatcttttttaaaatatctttttttagagaaaaatgtaattcttgtaaaaacacgtatcataacatttaccatcttaacgatttttaattgtccagttcagtagtgctaagtactcatattacggtggaacagatctccaaaactctacccattaaacaacttctcatgtccacgtccccccagtccccggtaaccactattccactttctgtttctcagtttgactactttagatacctcatacaagtggaatcgtacaatatttgttttttttttttttgtgactggtttatttcacttagcataatgttgctggggttcatccatgttgtagcatgtcagaatttccttccttttttttttttttttgagatggggtctcactctgttgcccaggctcactgaaacctctgcctcccgggttcagtggcacaatcattcagtggtgcgatcatcactcactgcaggctgtgtctccggggctcaagtaatcctcccactttagccttcagagtagctgggactacaggtgtgcaccaccatgcccactaattagatttttttttttttttttagagacgctgtctcgctatgttgcccaggctgatcccaaacccagtcctctcatcttggcctcccaaagtgctgggattacagatataagcctccaaacttggccactaaacttatttatttattattattttttgagacagagtctcactctatcacccaggctggagtgcagtggcacaatctctgctcactgcaacctccacctcccgggttcaggtgattctccagcctcagcctcccaagtagctgggattacaggtgcctgccaccacacccagctaatttttgtatttttagtggagacggggtttcaccatgttggccaagctggtctcgaactcctgatctcagatgatccgcctgccttggcttcccaaagtactgggattacaggcatgagccgctgcacccggcctcagcttattttatttattttgttgaggcaggttctcattatgttggccaggctggtctcaaactcctgacctcaaggaatcatctcatgttggcctcccaaagtgccgggattacaggtgtgagccatcatactcagcctcattttttaaaaaaattaatttaattttttctgagacagggcccaggctggagtgcagtggcacaatctcggctcactgcaacttccacctcacgtgttcaagagattctcatgcctcagtcttccaagtagctgggattacaggtgcacgccaccacatcctgctatttatttttatttttagtagagatggggtctcaccatattggccaggctggtcttgaactcctggtctcaagtaatctgcccacctcggcctcccaaagtgctgggattgtaggtgtgagccaccacgccccgcctcatttttaaaaataatgtttttctacccaattggatatgctgctggaaagaatgatttaatttttttctgagaatggaatatatttttcccccttcccttcccccttctcttcccccttcccttcccttccctttttccttcccttcccccttccctcctcccttcccttccctcctctcttcccttccctctccctccccctccccctccccatcccctcctccttccccctttcccctcccctcccctcgtctcttctcttcttgaggcggggtctcactctgttgcccaggctagaatgcagtggtgtgactatagctcactgcagcctccacctcctggactgaagcctcaagcaatcctctcgctgtagcctcccgagtcagctggaactacaggtgtatgccatcatgcctggataattttaaatttctttgtagagacggggtttcaccatttacttacctagactgtctcaaactgctgggctcaagcgatgcacctgccttgggggattcttagtaaatctacagggctgtgcaaccatcaccacaatccagttttggaacacttaaatcacctggaaaagatcccgcctgtccatctgcagccaatcctggccataactcccgaagccccaggtaaccactgatccactttcttttaccgtagcttaaaatcttctgcctctgactagcctgggaaacataatgagaccttgtctctacaaaaaatttaaaaattagctggtcatagtgtcatgtatctctagtcccagctacctgggagacagaggtggaaggatcgcttgaggctgggaggcagaggttgcagtgagtcgtgattgagctactgcactgtaactagggtgacagagcaagaccctgtctcaggaacacaacaaaacaaccttccgctcttcaaaggacagtgttaagagaatgaaaagacaagccacagactgggataaaatgtttgcaaaacatattacagataaaggatttgtatacagaataaactcaacattataatagataataaacaactcagtaaagaaaggggcaacaaagatctgaacagatatttcatcaaagatataagaatgacaagcatatgaaaatgtgttcaatattagtagtcattagggaaatgcaaatatagcagaaaactataatgagataccattaccccttattagaatggctagattgaaaagactgacactaccaagtattggtgaggatgtggaggaactggaactcctgtggttggttggtttgtttgtttgtttttgagacggagtctcattctgtctcccaggctggagtacagtggcatgatctctgctcactgcaacctctgcctcctgggttcaggtgattctctcacctcagtctccccaagtagctgagattacaggtgcccatcaaccagcccggctaatttttgtatttttagtagagacagggtttcaccatgttggccaggctggtcttgaactcctgacctcaggtgatccacccgccttggcctcccaaagtgctgggattacaggtgtgagccactgcgcccggccggaactggaactcttgtacgctgttagtcactgctagagggaatataaaatggtataactggccaggtgctgtggctcccgcctgtaatcccagcactttgagggcgaggcgggtagatcacgaggtcaagagatcgagaccatcctggccaacatggtgaaaccctgtctctactaaaaatacaaaattatctgggcatggtggcgcgcgcctgtagtcccagctactcgggaagttgaggcaggagaatcgcttgaacccagggggcagaggttgcagtgagccgagatcacgccactgcactacagcctgggcgacagagtgagactccatctcaaaaaaaaaaaaaaaaaggtataactatgctatactactttgcaaaagaggttagcagtttcttgaaatacatttctttttttttgagacagagtcttgctgtcacccaggctggagtgtagtggtgcaatctcggctcactgcaagctccgcctcccgggttcaagcaattctttcacctcagtctccccaagtagctgagattacaggtgcccactaacctgccggctaagttttgtatttttagtagagacagggtttcaccatgttggccaggctggtcttgaactcctgacctcaggtgatctgcccgactcagcctcctaaagtgttgggattacaggcataagccactgtgcccagccagaactggaactctcgtacactgttagtcactgctagaaggaatgtaaaatagtataactggccaggcatggtggctcctgcctgtaatcccagcactttgagtccgaggcaggtggatcacgaggtcaagagatcaagaccgtcctggccaacatggtgaaaccccatctctactaaaaatacaaaaattacaaaaatacaaaaattatctctccgagtcccatctactagagaggctgaggctggagaatcacttgaacctgggaggtggaggttgcagtgagccgagatcgcaccactgcactccaccctggcgacagagtgagactccgtctcaaaaaaaaaggtataactatgttatactactttgcaaaacagtttctcaaaatactttttttttagggatggggtctcactatgttgccgaggctggtcaccaactcctcagctctagtaatcctctcactgcagcctcccaagtactgggactacaggcacatccactgctctggctcataaacctttttttttttcctttttttttttttttataggcaggagaactgtatcttcaaaaatgtcaatataataaaaaacaaagaaaagatatggaaatgtttcagattaaaggaggccaaagagacatgtaaattaaataaaatacctgaccctggatcttttttttgtttttgagatggagtttcgctgtcgttgtctaggctggagtgcaatggctcgatatcagctcactgcaacctccgcctcctgggttcaagcgagtctcctgcctcagcctcccatgtagctgggattacagatgtccaccaccatgcccagctcatttttgtatttgtcatagagacggggtttcaccgtgttggccaggctggtctcgaactcctgacctcaggtgatccacacgccttgacctcccaaagtgctgggattacagacatgagccaccacgcctggccaaccctagatcttatactgaaggagaaaaatgctacaaaggaaattatgcagtcagttgacaaaattggaacacaaatagcagattaaagtattgtattaatgttaacattacagaagttgacaaattatgtaagaggccgggcgaagtgactcacacctgtaatcccagcactttgggaggctgaggtgggtgaatcacctgaggtcaggagtttgagaccagccttgccaacatggtgtaaccccgtctctactaaaaatacaaaaattagctgggagtggtggcgcatgcctgtaaccccagctactcggaggctgaggcaggagaatcacttgaacctgggagacagaggttgtagtgagccaagattgcgccactgcactccagcctgggtgacagagcaagaccttgtctccaaaaaaaatgtaagagtacattgttagtgacacacacacacacacacacacacacacacacacagagagagagagaaagaatgagagagcgagaaggagaaaagaatgagagagagagagaaacagagaacaagtccccaaagaaccttggtcaacccagctctccccttcttgcttgcggttcccaggcagaatgtaccaagattgcaacatcctgagataaagaggaacaacccaggctctctccacgatcctcctagaacagatgtcctgcaacacttgtgatcagttaagtcaagtcctggccagagtataaaacccagagttggggggtggtgtgctttctgagtccctcagctgcagtgtgaagtggagctcgtgcagatgagacttcctctgtcctatgcacctttcttgaggcttggggaccagctcaccgtggatcctaggcttctgttggcttttgccgcctttctgggagtaataaagttgctttgccttacttgtgtaagtgttctatctccctggacttatactcggacagctgggtttgtgcaaaatctcctagcaaatgcaggaatcttagcagaaattaacgaggtgtttagagccctcccttgggattggtaatcagtgtgtgatgtttctctctcagtgattgacactggtgtatggtattctgcttaacagagggagagaaagaacatgaaggagcaaatgaagtaaaatgaactaggttaatctaaattaaggatttttttttttttttttgagacaaggtcttgctatgttgcctaggttggtcttgaactcctggcctcaagcgatcctctcaccttagcttcccaaagtgcttggattataggtgtgaaccaccagctctgcctacattgaatgttcttgacaccatttttattttttgcaacttttctttctttctttccattttgggacagagtcttgctctgtcacccaggctggagtgcagtggtgcaatcacaacttattgcagccttgagctcctgggctcaagcaatcctcccacctcagcttcccaagtagctgggactacaggtgtgcaccaccatgcctggctaattaagaaaaaagaatattttttagagacagggtctctctctctatgctgctcagtctgatctcaaactcctgggctcaagtgattctcctggcttcacctcccaaggtgctggaattacaggcttgagccactgtgcctggccacaacttttctacaaatttgaaactattttaaaataaaaactttcaatattttaattatttttaaaacgaagatggcatggcataaaataaaaacaaatttaaaaagcaaacgaaagtttatttagagataaatttctgggcatagtgctaagcctgtgaaaatttatggtctaaataaagttggctgcactaataaccataagattaatttttaacctattgaactttacctaatcagaaggccttggtgtaaaatacggactaaaataaaaacatattaaaggttatctggggccggatgtggtggctcatgcctgtaatcccaacactttgggaggccgaggtgggtggatgacttgaggtcaggagttcgagaccagcctggccaacatggtgaaaccccatctctactaaaaatacaaaaattaacagggcatggtggtacgtgcctgtaatcccagctacttggaaggctgagaggcaggagaattacttgaacctgggaggcgaaagttgcagtgagccaagattgtgtcactgcactccagcctgggcaacagagcgagattccatctcaaaaaataaaaaataaataaaggttatctggttttagcaatatttttcaaactgaggtgaaattcatagaagatacaattagccattttaaagcatataattcaatgtcgcacaacaccatctagcaatataaatagtgctgccgtttaggataatttaatatttgtattttaaaatgttgcataaatgcttgttcttaaacttctttttttatttttttatttttatttttatttttgagacagagtttcactcttgttgaccaagctggagtgcagtggcatgatctcggctcactgcaacttctgccttccggtttcaagcaattctcctgtctcagcctcccaagcagctgggataacaggtgcccaccaccacgcccggctaatttttgtatttttagtagagacggggtttcaccgtgctggccaggctggtctcaaactcccgacctcaggtgatcgcccacctcagcctcccaaaacgctgggattataggcgtgagccacggtgcacagcctacacttccattttataacattttactttatttaaagatttaaattcttgttctttcaagaacccttctatatgtataatttaatttatttcttggactccttttattttattcttttatactgtagagatggagggtctttctttttttctttttctttttttttttttgagatggagtcttgctctgtcgcccaggctggagtgcagtggcacgatcttggctcactgcaagctccacctcccgggctcactccattctcctgcctcagcctcccgggtagctgggactacaggcgcccgccaccacgcccggcttttatgtattttttagtggagacggggtttcactgtgttagccaggatggtctcgatctcctgacctgtgatccgcccgcttcagcctcccaaagtgctgggattacaggcgtgagccgccgcgcccggccaaggtgggggtctttctatgttgcccagagtggtctccagcttctggcctcaagcagtcctcctgccttggcctctcaaagtgtttgggctgcaggcctgagccaccccacctggcctggaatcttttgtattggtacataatagatgtacatattttggggatccatttgatcatttgatacattcatatagtgttaaagattaaagcaggtttattgagatatccatcaccttaaatattatcttttatacacactttttaaaaacctcattaaaattagccaggtgtggtgctgcacacctgtagtcctagctacttgggaggctgaggtgggaggattgcatgaatccaggagttcgaggctgcagtgagctatagtgatgccactgcactacagcctgagtgacaagtcgagaccctgtctctagcaaacaacaacaatcaaaaactagttaagcatagcaaaatagttcatattacattctgtttttctttcagattagctatacacacacacaaaggcttaaaaattcagctatactaaaatgcagtattccaaaagacaccaattcttcattctttgttagccatcctggattctcaaacaggctgccaacatacaggatgactgtaggtgtctcgcagctactgagcaatacgatggctgtaaaacgcgtgcatgtgaggaattgcctgagcttagttcctgccagtcagctactgaaacaaacactgcagattttacttgattcgctctgaatactgatgcttcctagttcctgggggaaagatggtcagtctgctctgtaattcaacctgtgtgtaatcatcaatatgatcatcattattgtcatctagtaaaaccaagtggataatgctaagaatagggaaagtttcagttcccactaaattccttctctctttgtcgactctgttttcataggttttagaatgagttgaggcaagctcattttcaccttgcatttcagtgctgccttctggatgtgctctcttgaatctgccttgcgtttgctgccctcagtaactgaccctgcttccctcagttctgatcacactgctggtcagtgctgatgttcctttgagtctctgactgagatgtagtctccctgaagagacttcagctctccaaactcagtcatgattggtttaaaattgatataaaagccaccgatgaagggcttgttagcctggctctctgaagtccgacgaagaaagattgttggccaggtgcggtggctcacacctataatcccagcactttgggaagccgaagcgggcagatcgcctgaagtcaggagttcgagaccagcctggccaatatggtgaaaccctgtctctacaaaaatacaaaaatgagctgggtgtgttggtgtgtgcctgtaatcccagctactcaggaggctgaggcaggagaatcgcttgaacccgggaagcagaggtttcagtgagccgataccaagccattgcactccagcctgggcaacaagagcgaaactccatctcaaaaaaaaaaaaaaaaaagaaaaaaagaaaaaaaagaaagattattatgacagaagtcctggtacttgtctgctctgaacaagaagtggtttgacaaaagcccccgctgctgctttcattggtatttgcattttctgacagttttgctctgggctcagatccatttgtaacactgtcccaatctctatcccctcccctccacttctgtcccctcccctgccctccacttccctttcccctccccccctttttttttgacagggtcttgctctgtcacccagactggagtgcagtggcgtgatcttggctcactgcagcctccgtctccaaagctgaaatgattttctctcttcagcctcctgagtagctgggactatagacatgtgccaccatgtccagctaatttttgtatgttttgtagacatgggggtctcactatgttgcccaggctggtctagagctcctgaactcaagtgatcctcctgcctcggcctcccaaagtgttaggattacaggtgtgagccactgtgcccggtcccaatttctattttctacagggtgatttttttttttttaacttgacagtctagtgtgatagttggatggtgttggtagcagtttggacctgctgtattctttttcttcttccactgctttacttgactcaagtcttgaattaaggaatgaaacttttctgtgttctctgtctcttaagaagaaagagctatagctgttctcctgatagaccttctaaagtctgtgtaaagatcttttttccctctgtgaattatattcctcagaataagcagtatagttgtttctgaattggtaaacaacttttattattttattttcttgagacagggtcttgctctgttgcccaggctggagtatagtggtgcaatcacagctcactgcaacctcaacctcctgggctcaagagatcctcgtgtctcagccacctgagtagctaggactacagatttgagtcactatgctcagctaattgtttttttgtagagacaaggtttcgccaggttgcccaggctagtctcatactcctgggctcagttgatctgccaccttggcctcccaaagtgctaggatcacaggcatgagccatcatgcctggccaacaactttgattatttaaggtataatgtaaccttgttggctctagtctctgaactgtgtttctcattgtaataatgattctagcactattttccccaaatatgtgcttctccaaatggttttccttcttttgcctgaattcactactatctgattggcttgcataaccactaagtaaattagcatgcagagcaataggtctagaacttgcctattgattccaaatttcatttctaatctttcctatattgtaagtaaacattctttttttttttttttttttttttttgagactgagttgcactctgtcaccaggctggagtgcaatggtgccatctcggctcactgcaacctccgcctcctgggttcaagtgattctcctgcctcagcttcccaagtagctgggattacaggtgtgtgccaacatgcccagctattttttgtatttttagtagagatggggtttcaccatgttggccaggctgctctcaagctcccagcctcaggtgatccacccacctcggcctcccaaagtgctgggattataggcgtgagccatcgcccccagccagcacctgtttttaggtcatcatttctgttggggtttaagagttgaatacccatatcacattgaccaggaattaattgattgtagagacgaagtcttgctatgttgctcagtgtggttttgaactcctgggttcaaaaccctctcaaactattgggattacaggcatgagctaccgtgcccagcctttgaccaggaatttaaaatccacttattttcatgatttatattgatttctggctgaagccaacactcttcactggatttattcaactcacagatttcaatgtttggttcccatcttgtccactttaaggtgcattttatgtgcaataaaaggtgttcagacattttaaaaagattctctatttgaaatttttttagggactcctgagcctctgacatatgtcccaattaccctattctcaggtcaggctgaggtggggcatgtgcctggatccatcgaacagtgattgattggaagcaactgatgttatttctccagtagtgcttggaagcttatggttttcctctggcaaccaacaccatgttcattaataaaccagtaataggcttcttctctgtggagtttctcttgctgccatcttggttcattttcacgaatgattatggtatttacagtaggcagaatactgtccccccaccatgtccacaacctaatccccagcacatgtgaatatgttactttttgtggcaaatggactttgcagatgtaattaagttaacaattttaaatggagagattattttggtttagccacatggatccagtataatcacaaagattcttctagagtgaaagagggaagcaggagagccagggaagatgtaacaatggaagcaggagtcagagaactgtgcctgctggatttgacaaggaagagggatgcaagaccaggaacgcaggcagcctctagaagctggaaaaagcaaagaaatggattctcccgtgaaccaccagaaggaactcagctttgcttttatttttagcccaataagactcatttcaggtatctttctcctggaactgtgagataataaagttaagccactgagttcatggtaatatgttacagcagcattaagaaatgaacagtcttgttcttgttatgagctttgtttactatcttaacctgtgctagatgtagattgactcatgctgaaacaccctggctctcacattgctttccatgtgttggaagagggtctccgccttccattgttggtgcttttgtgaagtgctgctcacaggaagcaacaggagagggttgagttcttcagactgggttgcctgtgaagcccgggtgctgctgcttctctcccaccgctgctgcaaagttgaggacatgctccagggttttttttttgttaggagttctcgactgtccaggaattaggtaatccttttcctgaagataggtggcagtggggtgtggtagtggacttctctttagccagaggcagagactgggggcgggtgaaaggggtccagtggggtcggggctgtcatcacttttccttttttttttcttgttttttgagattgagtctctctgttgctcaggctggagtgcaacagtgtgatctgggctcactgcaatctccgcctcctgggttcaagtgattctactgcctcagcctcttgagtagctgggattacaggcgtgtgccatgcgccaccacgcccgactaatttttgtatttttaggagagatgggttttcaccatgttgatcaggctggtctcgaactcctgacctcaggtgatctacccacctcggcctcccaaaatactgggattacaggcatgagccaccatgcttggcctgtcatcacttttcaagaggcagtttctccttctaaatccatctcaatctccagtgagagaggagccaggagcctggctgccgtgctgcgtggtccatccaggtggaagggaaggctatggaggagagccagactcctgctctttgttttggtcagttcagaagtcacttaaccaataagtcctttcagggaaggaattcactctaccactacagaatagttttgcttcacatgttttcttgacacagaaatttgtagaaccacagcctctttcttttcttttctttttctttttctctttctttctctctttctttcctttcctttccctttctttctttctttctttctttctttctttctttctttctttctttctttctttctttctttctttctgtctctctctctctctttctttctttctttctttctttttctctttctctttctctctttctttctttcttgacagagtttcactcttgtcacccaggctggagtgcaatggtgcgatctcaactcactgcaacctccgcctcccaggttcaagcgattctccttcttctgcctcctgagtagctgggactacaggtgcccgccaccacacccagctaatttttgtatttttaatagagacagggttttgccatgttggtcaggctggtctcgaactcctgaccttaggtggtccacctgcctcggcttcccagagtgctgggattacaggcttgagccactgtgcccagccgcataattattttaactggttcataataatgagccagagttgtgctctgtcgcccaggctggagtccagtggtgtgatcacagctcactgcagcctcgacctcccaggctcaggcgatcctctcatctcagcctccctagtagctgaggccacaggcacgtgccacagtgcccggctaatttttatattttattgtagagatggggatctcactatgttacccagactggtttcaaactcctgggcctgtgatccaccttgcttggatctcccaaagtgctgggattacaggcgtgagccagtgtacccgcaatcttgcatcattttgattaggaattagtcctcagaaaccagtcatggcagcatggcagaagagacagttgaacatgtcttgctttatccactaggcatacttttttttttttttgagacggagtctcgctctgtcgccagagctggagtgcagtggcgcgatcttggctaactgcaacctccgtcttccgggttcaagcgattctcctgcctcagcctccggagtagctgggactacaggcgcgcgccaccacgcccggctaatttttgtatcgtagagacggggtttcaccatgttggccaggctggtttcaatctcttgacctcatgacctgcccgcctcggcctctcaaagtgctgggattacaggcgtgagccacctcgccctgctcactttgcatacatttgagttgggattctttcgctgcaaaacctgatcttcacctagattcaggttaatttattaactattactaatgattgtgaacagtgcattctattaaacttatttttcaggtatgcagttgtgtaaattggttagacttactacagtgtttagatctggaacgaaaacgtaaggcattttccatgtaactgcttggaacacgacagttacctgctactataaaaacggtagttttctatttatggaagagtttttcttaaacttatctagaattaaaagttaatttaaagaaagtactaattatgacaaaagcagggagtcgttagcacttgaaaccagagtttggtactatgagaaggtttttaattttaaaaagaaggaaaaaaagaaacacggacgtcagaaaactggttcagtagggatgggtgctagaaggctacggaaccgccgaaggcccaggagaaacccggaacgtgttaaccgctccaactggagccggacgaaaaaacggccccgcctcccgcgagggcgacgcagttcgcaggcgcgtcggcgcgcctgttctggggcgcttggcttcaccgcgcaggcgcggtcgccgctgttgttgtggtccccatggagctgccgtagcggacccagcacagccaggagcgtccgggatgagctcagccgcggccgaccactgggcgtggttgctggtgctcagcttcgtgtttggatgcaatgttcttaggatcctcctcccgtccttctcatccttcgtaagtggctgcctggcctcccaagggccggtggggatgccgccccagtcccccggcgggtctggcgtaggtacaggggtctcaactgggcgactgaaggccgtagtagcgtcttggttggtccgtaagcttttttgagatagttgttagcgtctaaaaggtacgacgctttaccccaaaatcagactttctgggttctagggggttgggagaaacaccgggcaaccctggactcttctggctgtgggtggcggcggcgaacctcacactgggagttcctagtgccccgctgtcagcctcgtttccgttaatcctggttcctagaggcattcgagcagccctcggccagggtttcccagaggcctggcgggcgaagtcagctgttccaggtcccggagagatggatcctcgcgtccaggagcccacattcttggggtgggtagggtgggagacaggtgtagagagaatctcagtacagcgtgatgccttcagtatccaagggagcaaccaggttggggaacactctctttctgccaggtagtgagtacattacctctgtctcacggctgctgggagaggcgagtattatcatcccaccctcctttacctcccggaggagtctggctcaagagaatttagtggtggcactaagtcatccacctagtgactggaggtggagatttgattgccttttggagcagggatagggatttggtggcaaattggacagggcgtggtggggtgtggccatggaaggcgggggtaccttgggaactgtccccgagaatgagcgccctccgtatgcccacagcagaaatgaggagctgttgggcaaaggcggagtcctcaaagattgggcgcattcgtttcagcgttgtcttggaaaacagttcttgcttttctctcctaagataaattggtagtagtggaggatattttattccaccagtattcattgagtgcctgttttgtgcaaaactctattcttactctctcaattgtcctactgtctgcattgtcctgagatatagggaattctcttttaacccctgagtctccttcagaatctttcctgatgctatccagtctttaagatgatgtctcaggcattgcataaaagactcctgatgagctggcccatgctcatcttcttgtttttaattgtaaaatacacataatatgaagtttatcatctttatcatttttaggtgtacagttcagtggcattaagtacattcacatttttgtgcaaccattatcccagaactttattattattattttaagacagggtctggctctgtgcagtggtgtaatctcgactcattgcaacctctgcctcccaggttcaagtgatcctcccacctcagcctcccaagtagctgggaccacaggcatgcaccaccacgcccaggtatttttttgtatttttagtagagacagagctttgccatgttggccaggctggtctcaaactcctgacctcaagccatccacccatcctggcctcccaaagtgctgggattacaggtgtgaaccactgcacgtggccccgctcccagaacattttctttttttttttttttgagacagagtctcactctgttgcctatgtaggagtgcagtggcctgatcttggctcactgcagcctccaccttccaggttcaagcgattctcctgcctcagcctcccaggtagctgtgattaccagtacctgccaccatgcccggctaatttttgtatttttaatagagacggggtctcactatgttgcccaggttggtctcaaactcctgacctcaagtgatctgtgctccttggcctcccaaagtgctaggattacaggcgtgtgccaccacgcctggccccatcccagaactttttttatctcctctaaccgaaactctcgcactcattaaacaacaactttccattcctacctctccctggcaatcaccattgtactttctgcctctgtgaatttgactactcttgggacctcatataagtggaatcagacagtatttttccttttgtgactggcttcttttcactcagcataatatccttaaggttcatccatggtgtatcatgagtcaggatttcctccccttttaaggctgaatagtatcccattgtatgtataggccacattttgtttattagttcatctgtctatggacacttgggttgtttctaccttttgactattgtagataatgctaaaatgtttacaaatatctctttgagtctctgctttcagtttttctggacatatacccagcagtggaattcctgaatctatggtaattctatgttgaatttttttgaaaaaccaccatactgttttccatagcagccacaccattcgacattctcaccagcagtgcagaagggttccagttgctccatatccttcaacatgtattttgttttcttatttatttattctttttatttttttatttatttttattttttgagatggagtcttgctccgttgcccaggctggagtgcagtagcgcagtctcggctcactgcaagctccgcctcccgggttcacaccattctcctgcctcagcctcccgagtagctgggactacaggtgcccaccaccaccacaaccggctaatttttttgtatttttagtagagacgaggtttcaccgaattagccaggatggtctcgatctcctgaccttgtgatctgcccgccttggcctcccaaagtgctgggattacaggcttgtgccaccgcgcccagcctatttttttttttattatttattttattttgtttatttattttttgagacagagtcttgctcttgttgcccaggctggagtgcaatggcgcaatctcagctcactgcaacctctgccccccgagttcaagagattctcctgcctcagcttcccaagtagctgggattacaggtgcccgccactatgcccggctaatttttgtatttttagtagagacgaggtttcaccatgttggccaggctggtctcgaactcctgatctccggtgatctgcccaccttggcctcccaaagtgctgggattacaggtgtgagccactgcacccagctaatttttatttttttgagagggagtctctctctgtcacccaggctggagtgcagtggctcaatcttggctcactgcaacctccgcctcccaggttcaagcaattcttctgtctcagccttccaggtagctgggattacaggtttgagccactgcgcccagctaatttttatttttttgagagggagtctctctctgtcacccaggctggagtgcagtggctcaatcttggctcactgcaacctccgcctcccaggttcaagcaattcttctgtctcagccttccaggtagctgggattacaggtgcatgccaccatgctgggctaatttttgtatttttagtagagacggggttttgccatgttggcgaggctggtctcgaactcctgacctcaggtgatccacctgcctgggcctcccaaagtactgggattacaggcgtgagccaccacccccggcctttttttttttttgtaatactaaccattctaatggacgtaaggtggtgtctcattttagttttgatttgcatttccctaatagtgatgttgagtatcttttcagatgcttatggccatctgtttatctttggagacatgtctagtcaaatcttttgcccccttttaaaatccagttgttttttgttgttgagttccttttgttgttgttattattattattattattattttttgagacagagttttgctcttttgccgaggctggagtgcagtggcgctatctcggctcactgcaacctctgcctcctgggttcaagcgattctcctgccttagcctcccgagtagctgggattacatgcatgcaccaccacacctagctaatttttgtattttttttagtagaaagagggtttcaccatgttggcctggctggtctcgaactcctgacctaaggtgatccacctgcctcagcctcccaaagtgcggagattacagctgtgagccaccacacctggccgacaatttttttttttttttttaacttttaagttcagggatacatgtgcgggtttgttatataggtaaacttgtgtcatgggtgtttgttgtacagattatttcgtcacccagttattaagtctagtattcattagttatttttcctgattgtctccctcccaccccctatcctccaccctccaaaatagaaaaatttgtttttagaggccgggtcttgctctgtgactcaggacctgtggccacatcctgtgctgcctcatacaaccttatggcctctctaacctcaacccagttagctttcctaaacccatttccctatgattgttaacacttgttgttagccaggttcagaaggataacataattattatcccagcagagtacacccaccctgtaatcggtaagagagatgtttggcctggtcactgggtttgtggtgagagtctgtgaaaagctgtaaggaacgcgctggtcttcagtagggtcaaatgctgctccttcaccatcgtcagaggctacttcatcacagcctctctgatttgaggattcaagtgggaaagactcatgacaagcagcagaaagtcgaattgggaaaacagtgccctcagggatggggccgcgctcaggtacttagattataacctccgttgggatgtttctgaagctttcgtcttagcagaagttagggaggcagcaccccgatctcagcactcagtctaggccgcactggtccccgcactggtctcccccctccccccgcgtgaggccttaggaggtctgaagtatcagaagtccttgggccagttaagcctagcaaggtcctgggaggcgatctcagctgtccgctgcggtgggggtgggatgcctggtaaggacaccaagtccgtggtgttggcgtggttggaattttcctgggatcgctcccttctcttcaagctggtcacggggacgcatggttgagagcgcctagttcattcagtaggtggtccaggactttcttcagctatagaggggaacaaagacgcctttggtgagcaccggctctgcagctctgcgggtgcaggggaggtgtactgcgtaggtgccccaggactggcgggggctgagggtccatgcgaacggcactactacgcaggcgtcgcaggactggcccgggctcaaggtccgtgcaaactgcatgcactgcgcaggtgctccaggactcgcgcggggtcaaagtccatgcaagccgcacgcactgcacaggtgccccaggactggcacgggctcagagtccacgcataccgcacacactgcgcaggcgctccaggactggcgcgggctcagagtctatgcaaaccgcatacactgtgcaggcgccctaggactggcgctggctcagggtccctgcgagctgcacgcactgcgcaggcgccccagagctggtgtgggctgagtggccacacgagccacatgcactgcgcaggcgccaggaggcccttcctctcaatccgagctttgcagatgaaggactctgcgtgtgttgccttctgggcttacgggccgagtgccctttgagattcaactttttctaaattatccttcactttctgctgtaaagagtggccacctcctttttcctctaggggactgaagcgagaggaggatattgcagggtttgcctctgtggtcatcttcttagagagcaccccctccgcccccacacccttttcctcagagccgttgcttagtgagtccctgccatggaccaggcttgggaatggtccccaagtattagtttaggaggacgactctctgcttcacaggacctaccccagaatcctgtgactcagaagcgcgcttgtgaagtgcgcatgtgcgggcagggcctccagtggggctctcgtgggggcagcagccaaggactggggctggtggcctggagagctgcccgcttctccgcccttgccggtagggttcctggccgagagtggcatctggggctgttcagggtctggagcttcctgagttggaagaccctgtcctctgtgttcagggactcagggtgacctgagttggtggttcctgggtttgcctgctctactgctggcagggactagcacggggtgtgcacgttgtcatgccatcaattaattcagagattcacttttgttctaaaaattaatatttgcattattacatttagattcatattaaatcttacactgcatgattctagaacattttaacacttatacgtgggtcttggattaacattgatacatatttgcaaatttatactttaaaacttttttttttttagagacagggtctcactctgttgccaaggctgtagtgtggtggtgccatcataactcacagcagcctcaacctttcgggctcaagtgatccctccctccccgcctcagcctcctgagtagctggggccacacggaccacaggcgtgcaccaccacacctgactaatttttaattttttggtagagattgggtcttgctatgttgccccgcctggtctcgaactcctgggctcaaacgatcttcccgcgtcagtctccgaaagtgctgggattactgcactgcgcctggctcagacagtttttattgtgcttatacatgtaatagatgtaattattttttcaagcaccagttgtttttgttaaccttacaaagctgccttcagttttcctgaagttcacccttctgccttcactcacctcccattcctgagttgttttgtgtattccctataatgctaaataatgtcttggaatctctttttctttttaaaatatggttttaaaagtcagatttattgaagtgtaatttgtataaggcgaaattatcaaaaagtccttagcagtgtctgtagattttccttgcttttgaaagataattttgtgattcatctaagagaatttggcccattcctatttccttctccagagtggatcaggctggagtatagctccttcggttatagtgctgggtagtggccagggcagaggcaccacaaagagagctggatttgaaccccctactccctgcgcaaaggctgccagaagctgcgctgcagtgaacacgctgcgcatgagcccctagacccctccaccccccctactccccacactccccccccccacttttgcctcatcacgcaggcgctggtaggcggcatcactgggcgggtcagaaaccacgcgcatgcgcagacaccctcaggcgactggcgggtcgcggcttccaagctctaaatggagagttgtccctactgtgcggcaggcggaggagacctgtaagctggaagggggagggggggggatctgatttattgtgtgccaggcacactttagatacactataacatttcgtctttattaatctatttttaaaatttcgaaacaaacacaaatgtgcagaaaagttatatacagtcaataccgataactgattttgtttcctgaaccatttggaagttgtcaacccaaaccccctcattccgagatactttggtattcaaaagaatcttgggggccgggcacagtggctcacgcctttaatcccagcactttgggaggccgaggctggcggatcgcttgagctcaggagttcactggcaacatagtgaaaccgtgtgtctactaaaactaaaaaaaaattagtcgagtgtggtggtgcaggcctgtagtcccagatgctcaggaggctcaggtgggagtatcgcttgagcccaggaagtcgaggttgcagtgagccgagatctaatgcaggcgtcaagtacgttaccacgatctgatcctcagaccccatgcaggttccccacgtttcgcagtaatgtccttaacagggaaaggacccagttcggaatcatgcattgcatttcccggcctctagcctcctgtctggaggagtttcccagtcttcccttgactttcatggctgtcatttgtgggtgtcagaggccagtgatttcgcagaagggacgcctactggcatgtctgatacttggtagggatttctgagaggcagtgctgtgttctcattgtgtctcatccgctggtgtgggactgggatttggggatgttcgctgatcccttggggtaggtgccagaggcgccactgagggatctggtcttggggcgcccgcgcagtccttggactaggccttcccggcagatctgcgggcgccacctggcggtcactgccgactcctccgttgcgctccagtcacctctcccatcccggtgccgtggccgggccgttccctggagagtggacggctggggctggtgcagggaacaggggcctgcgggggctgcgcaggcgggcctccaggtcatgcggggcccctctgctcacagggaccagccaggccagcctggggagcgtgcttctttgtttatgtctgtatttctctgcctatctgtggaaaccacagatctccaattgaagccaacaccacaagattcattctgcttctctccgagacgcctgcctgcctgccttccttccttccttcctccctcccttcctcccttcttcccttccttccttcaccaggttatgaaagtggctaatttttcatattttttgtagagacagggtttcaccatgttgccaaggctggtcttgaactcctgggctcaagcgattcacctgccttggcctcccaaagtgctgggattattggcatgagacaccgaacctggccttttttcttttgtcccccttttttttttgagacaaggtctcaccctgtcgcccaggctggagtcccatggcatgatctcagctcactgtagccttgaactcctgtatacaagagatcctcccaccccggcctccagagtgttagggttgcaggccgagccaccatgccaggctgaggcatctttctaagtgtctttgttgaaagtgagaagactggcttccgttactctcaatatgtttatttctgtgatcacccttttgtaattaatctctggtgtccaccgcccactgttacccaagtgaatgcatgcctctccccacctgggctccgaccctggcagggttccttcttgtcttgtatgtctgtctccctcaccctacagaccctgactcctgtgtcaggctgccctttcttggggacccctgtatcaccatgcctggccctgatgcctcttgccagggtgccattctgtgggaaggccctctgcactgagcttgggcactgacattctgccctgggcccctgcctcaccactgttaccctgcacctgcaccttgctctgccccgtctaatctaggactgaattcttctgggaggggagaggttacatgttccctgtcactggaataacagctctggtgatggaattggttttcatttcacaattgcaattttatttatagtgaaacagacaaacatttgtattggagcaaattcatgggcatatctgtaaaaggaaaaatatagtttgaatagcaatttgaatatgagttttttttttttttttttttgtggtcgttatagggagccgaaaaaggcagcagaggctggctgtgtaggtagagggcagcttgcccagttggcagaggtgggagtaggatgttggaggaaggtgtaccggttctgtctggccaaacccatgctggagtcacctcaaaagcagtggcaggggagttccctcaaggggctgctccagactgcctggagatggggctggcttggattccaaagaaagaagcactaaacgccagggtgataagtccacagcattcatgacgggaacttacaagagctgcggcagtcccgggacagccagtgagagaaagggacatttacctagggctgtctgccacccgggggttggggtatggagtgtatgtgggagtttaaggactttgtcatggtggggctagtttgtaggtgtttctcagcaggatgaatctcccagtgttctccagcaacagcctttgctctttatcagtcctgggaacgttcacggccgcagtttgcattcagtcctgcagggacgcacacaactggctgggtcacagagtggtcagggcatagacagaaagtagcgggggactggggaaccctcctgtgacccgtgttggaaggtgctgatccccgttgtccgccctgccagatgtccagggtgctgcagaaggacgcggagcaggagtcacagatgagagcggagatccaggacatgaagcaggagctctccacagtcaacatgatggacgagtttgccagatatgccaggctggaaagaaagatcaacaagatgacggataagctcaaaacccatggtactgtgtcccttgcagcctggaggcttcatgagagcggatgaatagagaagtctgtatgtgaagattagtagaatacatactttgcttcttggatgttctgaatattgatggaaacttaagttatctggaggaaactcagtaataagtattactttcctcttatttgctggtgaacctttgctttctaagcacagaaatatctaagatcctctcagattttcctcagagccaactctttaaaattttaagctaactcttaaaaattgtaggttttcatttttaaattcatcacttttctgagagaagcccagaaaaaaagtctcacagtggattcccagaggcttttgttccactctctagaaaaatgcccagcagtgtcctcttctgagtgtcacctcccgggtccagtgtcctgtgatgaagagcgctttctcagggcagcccgtgtgctgagggaccccggtcacagtgtgtgcacagtcagagagctgtctctgtggctaggaaaacagacagaggggcctgtccaggcccaggacaagctggactcccaccaggggttcgtgtactgtgcacactgggaaataaggaggaaaatttagtcctgttggtaagtggtaactgtattatacaaagaatctttgatttcatgagtcgttttaagagttttcaaaattaaagctattcaaatctcaatctgagtcggatactattttaaataatggcataatgagatggtgggtgacttaaaaattctattttatattttctaaatatgttgagcgattgttccatttataatcagaaagtgtattataagggaaaataacatttctgtgtatttgaatattttgttaatttttcaggactgacataattatttatcctgtttttcctttcagtgaaagctcggacagctcaattagccaagataaaatgggtgataagtgtcgctttctacgtattgcaggtaagtgtgctagagcgtcagccgggtcattggagttggtgaccccggcctccagagccgtgtctgcagatccagggctgggagttcgggctgttccaccttcagctgtcgtgtcgtgtgtccctgcccacatggagctctaaacactctcggtctctaagtcagactaaaaggaagcctttctcttgaggagagttgttaaagtttgggactttttggcagatggactgtgaagtaagttctcggagagctttcaccatgcctgcatcccagtgtggtttgaagggcctggtgggatgaagcgagaggcttatagatgacatcagttttttctgagatcttcaatacttttggcccttacttgttacctggtgtacttcatgcacgctctccaccctccaggtagagaaccagcttttccgactggaattggcttctagcctccctgcctggggcttaaccctcatagcctctcctggagctgttgggctctgctctgccccgagagtgcagttgtgctgcccagacacctttagcagctgccgtaaatatccgagttgcagtaccatgtgatccggtaaccaaggcaaaggattcaagcccacccccaaaaaagcttagtttggcagggtatattgaaggaaattaattctgaggcactgtcatttgctaagagataagtttccgcagacaaaggagttaggccagcaaccctctttcatgtctcttctgagcggcctgttcaagccaggaaggggacagatgacaatcgaaggaatgctgtggggggatggagggaaataaagcatcccccaccattgaaacttacacagggctcacctctgcgtcccttgctaacactggtgtacgtgggagaattcactattttttccaaggatggctttcgtcactaataaggtgtgttgagcatacagtctggctactcaaacgagatactcagtgagaaaagcacacccgtgttatgggagactttggttagtttatcagctaatttaaattatgtgtagattgtgttcatcctaaaacagtgaaatgccagttcacataggaaggctcgcctacttgttggcagtgttcagacatgctgctgagctcgtctttaatttgactttctcattcaaggtttcaccaagggacattagtggctgtgcgtgctcatctgttgtctgtggggactgggttcctaggcttgaggtgctcagtctggagagttttcctggttttattttcgcatttccctgtcctcccttctgtgtggtcggttgtgtgattggcaggctgctttgctcaccagaggtgtctttacaggctgccctgatgatctcactcatttggaagtattattctgtccctgtggctgtcgtgccgagtaaatggataacccctctagaccgcctggtagcctttcctactagagtagcaggtaagaattttctggaagatgcagtggaagagtgtgaataggcttatgtagaggtgtgtggtagaagattaagttagcctgacatcctcctcaccgtccatttagtgagcggggttttgtgtctcagcctcacatgaggcttcccatgaagaaactgaggtctgaaaaagttacttcacttgtccagtgtcaccaaaatgttaaggagcaaagctaggattcagtcctaggtctgtttccgggatccatgcccaatacgtcaagtctgataccccattgaaacactagccgtagttccaaaattatgtatcttttcaatccctattatggttggcttctctgtagcacttgctgctcctggctattcttttattttttattttttgagactgagtctcactccgtcacccaggctggagtcagtggtgcgatcttggctcactgcaacaacctctgcctcccaggttcaagcaattcttatgcctcagcctcccaactagctgaaattacaggcatgcactaccacgcccagctaatttttgtatttttagtagagacagcgtttcaccatgttggccaggctggtctcaaactcctgaccttaagtgatcctcatgccttggcctcccaaagtactgagattacaggcatgaaccactatgcccagccacgttcttttatttttgaagataaattttttttagatattaaaagtagtacatgtcactatagaatgattagaaatatagctatcaattaaaaatcccagctgggtgcagtggctcacgcctgtaatcctagcactttgggaggccaaggtgggcggattgcctgagctcaggagtttgagaccagcctggccaacatggtgaaaccctatctctactaaaatacaaaaaattagctgggcatggtggtgcgtgcctgtaattccagctacttgggaggctgaggtgtgagaatcacttgaatccgagaggttgcagtgagctgagatcacgccagtgtaccccagcctgggtgacagagtgagaatctgtgtcaaataaaataaaataaataaaaaataagattcctattagcttttaatgctgtgatatgtttttctttgcctttttttccccatttattttgatatagttaaggtcacctggcacatcacatgttgtgcctcctttttactttatagggtaagcctattcccacatgttttagtttgttagggttaagtgaaatactataaactgggtagctcataaacaacagaaatttatttctcactgttccggaggctggggagtccaaaatcaaggtgccggcagatttggtgtctgatgatggcccattttccagttcatggatggtgtcttctcactatgtccttgcatggtggaaggacaagctcctttaggcctcttttataagggcactaatcccattcacacggactctgcccttgtgacttaatcacctcccataaggccccaattcttaatgccatcactgtggggggtagcatattagcatatgaattttagggggatacaaacattcagaccatagcaccatatcagtacatttcttttcttttttttcttctcttttctttttgaggcagggtcttgctctgttgcccaggctggcagtggcaccctcatagctcactacagcctggaactccttggctcaagcggtcctcccaccttagtctcctgaatagttaggatcacagttgcacaccaccatgcccagctaattaaaaaaaaaagttttttatagagatggggtcttgctttgttgcttaggttggtcccaaactcctggcatcaagcaatcctccctcctcagcctctcaaagtgctgggattataggtgtgtcaccttgcctggcaaatttctttattaaggaattttcagtagctgttcttcatttagatatctcatttgcagattttcctgatgaaggatatttattccggtcctgattttttgctattaaagataatgctgcagcacacatacttgctggtctttggttgtgatttgtgattatgttagaggtgaatactgtatcaaaaggaatgactattttttttttttttaagaccgagtctcactctgtcgcccaggctggagtgcagtggtgtgatctctgctcactgcaacttccacctcccaggttcaagtggttctcctgcctcagcctccccggtagctgggattacaggtgcccaccacacgcccgactagtttttgtagttttagtagagacagggtttcaccatgttggccaggctggtcttgaactcttgacctcaggtgatccacctgccttatcctcccaaagtgctgggattacaggtgtgagccactgtgcctggccaggaatggctgtttcaaagactcccaatttagctaccacccctgtccccttccccaccctttccttcccctctcctttgtttgacacagctgggcctaggccaggagctctgcactgcggccagagaagcatccagccacccttccatgcatccagcaggtccatgggtcactcttgcagcctgtcttcctggacagggggatatgtatgcctctccattattggtggggcaagaaaggcataggtagacattgctttgtttataatgctttctgagaaaggaaaaataaataatcttacaggtttggttttggaatctattaatatcataaatagtaatgcacatctctctggcaggaaagggaaattcagcccagggtccaccgttcactgcaattcctgcttagtaaagaatacagccctatgattctatagaaagtgacaaattcgggctgggaatggtggctcacacctgtaatcccagcacttttggaggccgagttaggcaaatcatctgaggtcaggagtttgagactagcctgacctacatggtgaaaccgtgtctgtactaaaaatacaaaattagccgggtgtcggccgggtgcggtggctcatgcctgtaatcccagcactttgggaggtcggggcgggcagatcatgagttcaggagatcgagaccacggtgaaaccccatctctactaaaaatacaaaaaattagccgggtgcggtggcgggcgcctgtagtcccagctactcgggaggctgaggcaggacaatggcgtgaacccgggaggtagagcttgcagtgagccaagatcgcgccactgtactcccacctgggtgacagagcgagactctgtctcaaaaaaaaaattagccaggtgtggtggtgcacacctgtaatcccagctactcgggaggctgaggcaggagaatcgcttgagcccgggaggcagaggtgcagtgagccgagatcgcaccattgcactccagcctgggggacagagcgagactccgtctcaaaaaaaaaaaaaaaaaaagaaagtgacaaatttgaacctatgaaacataaacttcacttcagcccagcactgctcaaaaagaatggaaatactctctttgctgtgagttaaagacagcagagacagatgggggcagcactgctggtatgcgctctcatggtgaatgtctttgttttcaggtggtgttggaattacctgttggattttagtctgtaacaaagttgtcgctattgtgcttcatccgttcagctgaacaggaggatggatacagccgcgaggctaaaaaacggatttcctcttcctagcttaaaatctgatttacactgttttgttttttaagaaacaaaagtgcatagtttagattttttttttgttgaatatgtttgttcttggactttatgagagagtcttataagaatcacgattttctacacctgtcattgagccaagaaagtccagtttatgacacgtatgtactagtgaacaccgtcctcgatctgtacgaaatgtgaaatgtttagggacatctccatgctgtcacttgtgatttgccctcttatgtattttggtcatattgccaactggaaagtcaaaattttctaacaactttaagtaagttctttgaagacttagtgctgtttttaatccagtttagaaagtaacttaattttaataccactactaaaaattcgaaaatttcttctttaatcacattcaatatggttaaaagaacaacactaattgacattgcgtgggctttttctccctttgtttaaaatgtcatttgttgagcaagagttgtatagtattatctacttacttgaggctgttaatttttcattacagtgttttgtaaatgtatccacgagaccatgatgcattgttttgtgctcaacttgtgttttgtatttaaagcattttgaatgaagtgtattttataagcatttaatatttatgctctttagaatggaacacagaaaacaaaccttataagtcctgattaatctgaaccaataacctgtgtggcctacaaagtataattctattaaatgttccttaaaacacttttttctaattaaaatctttgcaaatgcttgtgtaacttcctgccttacagctacttgtttgctgtgagccacccgcaactgacaagtggctgttaactgagtcaccatatcccagtaaagctgaattttctcactagtttctgcaagttcatatttgtactcttttgtttcctaatgatctaataagtagtttgttgttattttagctgattggactgtgagaagacaaagtgctgtggtcctttatttattgtcatgctgaaggccaccacagcagcttttgggttccacttactcaaacacacatgcacgcaggcttacccagcaccaagtttacttagctttaagaaaggacagagcagggaacgcagccacagcctggtggaggaactggacaccagcttccagtgtccgtcaccacacgggatacattttgcccacaaaggatgagaagccaacctggggaggagatgagagtagcacacggaagctgcaggaactagtccttcagacgaaatatagcaccaagggggcacgtgcctaactcccgttttagtaagctgcaggcagaaatgatggtggacagtcaacagtgcaccggccatgtagagcgtgcccagggaactgctgggatcactcatccgcatacagtgtccatgatgatacccgtatctcttaaagatattctcattcagttgttacaagaattttgacaaatctcactgaggctagaggtaaaaatttctggttcacagctattaactttccccatgcgtgaatagtttgtgatgattaaataggggaaatgtaaatgtcctttatgtttcacattattgtgtttttttagaaattatacagtttttttttttttttttttgagatgggagtcttgctctgtcacccaggctggagtgcagtggtgtgatctcggctcactgcaccctttgcctcctgggttcaagtgattctcttacctcagcctcccaagtagctgggattacaggcgcccgccgtcacgcccagctaatttttgtatttttagtagagacaggatttggccaggttggtcttgaactcctgacctcagctgatccacccgcctcggcatcccaaagtgctgggattacaggcgcccgccatgacgcccagctaatttttgtatttttagtagagacaggatttcaccatgttggccaggttggtctcgaactcctgacctcagccgatccacccgcctcggcctcccaaagtgctgggattacaggcgcaagccaccgcgcccggcctgccatttgttttaacagatgatgaacacggtgatgaattcagaagatagagaaagagctacagtaaatgtgcatcttacgactcttgtcccccaatttcccaaagttttcctctgttaacagttttttatgattctgccagtgatattccatgcatttatgaatattcatgcatgtgcttttaagacatgttttaaaggtataaaaataatacctaaaaagacaaaagtagtacctatttactgtttttttttaaaaatggaacttgggaagtacagaaaagcagcaaggaagaaaaacctatgactccatagaactagggtgactggcgttagcatctgtgcttttgttttttgcatatatgtgtgtataatgttgaaaggtaatgataggtttattttttttaaatttattttattttttgagatggagttttgctctgtcgcccaggctggagtgcagtggcgcgatctcggctcactgcaacctctgcctcctgggttcaagtgattcttctgcctcagcctcccgagtagctgggactataggcttgcaccatgacgcctattttttgtatgtttagtagagatggggtttcactatgttggccgggctggtcttgaactcttgacctcaggtgatccacctgcctcaggcccccaaagttgggattacagacctgagccaccacgcccagtgggtttttgtttttattttaaaaatactggatatattttatagcttcacgtgaaagcaggtatctctttgatttaaaatacatctaaagctctcttcataccgattttgtcataaatttatggtaaatcaagcagggaaatttttaaatatacaaatccataatctttttttaattttttttttttttttaagtagagacagggtctcactatgttgcccaggctggtctcaaactcttgggctcaagtgctgggattacaggtgtgagccaccatgcccagcccataatcaatttttattcattttatgtgctgttgccaccataaggggctggaatgctaggcaaactggtttactgtcccctgacctgggggggctctctggccttccatagtttttcttacacagtgcatcatgggagaggtgtgtgtgtgtgtgtgtgcacgcgcacgtgctgacagccccccggaaccggagctttagacttaaagctttctcccttatggtggtggtttcctttctttcccatcctcatctgagcatttaaaatactatctgtatgactgatttgttgtgtctgctgttgtggttttgtttctcttgttgtagatccttgttttgtgtgtgataaaaggttatttcagtgatgacgcaagtgcctttagggccagagactattccttgagcttttctgtactcctcctgcatgccttcagtcagtacccaagagtatttaactcacaatcacataatggttttccactagagccgtgtatggagtctgttttctttgcagttgaaatgttagcaattaacaaccgtcaggagaattttctaagtgctgctctcttataaggcctgcggtatggagcactttgatgacatctcagattcaaagccatgtgtgactggtttgaacaccattggaatcccaggccaggcagctcatcctgtctctggacccagggttcttgtgtgggtcggctttcctgcatgcatctttgggttctaatgcgtatcaatctattgacacgcagagtgctgactcttactagtgaattcaatcataaatagcatgaatattgtgtagttttagccaatattgtgggaaaggatattggactctaaagggtagggtaatcattcctttatgttggccaaattcttttcctgtattttttttttttttagagacagggtctcattctgtcacccaggctggagtgcagtgacatgatcatagctcactacaacctcgtgctcctggtctcaagtgatcctccagccttggcctcctgagtagctgggattacaggcatgcgccaccatgcctggctgtttctcattttttatttttgtagagaggagggtctgactgtgttcccaggttggtctcgaactcctggactcaagtaatcctcctgcctcagcctgctaagtaggtgggacaataggtgtgtaccacaactttggactaatttttaaatttttgtagagacggggtcttgctatgttgcccaggctggtttcaaactcctggccttaagtgatcttctgcctcagcttcccagagtgctgtgattacaggtgtgagccactgtgtccagccatttttcctgagtctttttaaaaaatagtttttattaaatattgagaggtataaaatatttaaaatatgtaaattttaaagaataaaaatacaatacaaatctttgtatctttcacccaagttttagaagaacctttgcgatccccactgagtaaaggtaacaccactgctctgaattttatcatttcctattcgtcagagttgtatcacatacttgaatctgtaaaaatacattgtttggtttctcatgcttttcagcacgcagacatgtctgtttttttgcgcttcactttactgtgctctgtagagactatatttttcacaaattgaaggtctgtggcaaccctgcatcgagcaagtctgtcagcgccgtttatccacagcatgtgctcactttgtgtgtgtgtgtcacgttttggtagttctcataacatctcatattttttcgttattatatgttatggtggtctgtgatcagtgatctttgatgttactactgtaattgttttggggcatcaagaactacacccgtatgaggcagcagatttaatgtataaatgtgtgtgtgctgactgcaccactgacttggccattcccgtctctcccccttccccagggctccctattccttaagacacaaaaatgttgaaattagggcaacattggcccctaatttcaataataatgatgacctctaaatgttcaagtgcaaggaagagttgcgtgtctttcgtgctagcttttattttatttaattaattaattagtttatttgagatggagtcttgctctgtcacccaggctggagtgcagtggcatgatctcggctcacagcaacccctgcctcctgggttcaagcgattctcctgcctcagcctcccgagtagctgggattacaggcgtgcacgaccacacctggctaatacttgtatttttagtaagagacggggtttcaccatgttggccaggctgatctcgaactcctggcctcaagtgatctgcctgcctcggcctcccaaagtgttgggattacagtcttgagccacctgtaaagagtctgagttctttacttacaatcttttagttcactgagctggagaccccagggaggtcccagcattgtatggaaaacggaccccctaacttgggctgcctgggttttgtcctcaggaggagtctgtgttgctcagacatattcggcaaatgccctttaggcagaagcttactttagtgctttgcttacttatctccttgggtgcctaatttcttttcgtgtttaccagctgagcagctgatttagaaacgttttctatagttggtacagcatttttagcttttgttacagcaagagtgttggagtaccttctctctcagagctcaggaaatggatttgtttttaaaaatcttttttccatgatcgtaaagttatgttcatcatagcaaacatgcgaaagaaagccagagtagaaaacactaaaagtaaattaaaaattggccccaatctcataatactcagagataaaaagttagcatgttaatctgttaccctctaacttttttattcatacagttaagatgactagacaacaacaggcttagattgtatttttattaaattagttctctacacttctaaatatagctctgatttaatatcacgatgtgtgctttcattgtgggtgggcataagaaaagatcccttggaaaatcctctgtctgctatgaagctggagtagacactgtcatgttactcagcataccatttccaggagtccttttaatacatttctccggaattgaggccactatgtcatctcacttaatttgcgtatttccccttatgagcctgtgagagctctccctccctgcctcccttactccttccgtcctcttcttttctatgttattccaccttgcttttcataaacgatcaaagcatatgccaattgtagtatttatctcatctttggttttattattttttaattaattagtttgacacggagtctcgctctgttgcccaggctggagtgcagtggtgcgatctcggctcactgcaagctccgcctcccgggttcacgccattctcccgcctcagcctctccagtagctgggactaaaggcgccgccaccacgcccggctaattttttgttatttttagtagagacggggttcaccgtgttagccaggatggtctcgatctgacttcatgatccgcccgcctcggcctcccaaagtgctggggtgagccaccgctcccggtctactatttttatttttattttttttttgagatggagtctcactctgtcgcccaggctagagtgcagtggcgggatcttggctcactgcaacctctgcctcccaggttcaagcaattctcctgcctcagcctcctgtgtagctgggactacagatgctggccaccacgcatggctaatttttgtatttttagtagagacggggtttcaccaaattggtcaggctggtctcgaactcccgacctcaggtgatcgcccgcctcagcctcccaaagtgttgggattacaggcgtgagccactgcgcccggctctatttttatttttatattttttgagacagggtcttgctccttcgcccaggctggagtgcagtggcacgatcctggctcactgcaacctcctcccaggttcaagcgattctcctgcctcagccttccgggtagctgccattacagttaatattacacaccaacacataaacatcattggaaaggaaatagtatggtctagattataaacaagttgcccttataactaaatgaagtaagctaaataaagtgaggctgggagtatagcctcctttttacagtcctaatttaaaatatcctaagtttagtaaatatattagttaggactgagcagctagctcgaataaacaccagcagggccatggtactgttttatggtttttagaacaaggttaacagaaaaatggtcaacatacaggtatgcaacaaatctcaataaatgatactggatctcaggtgtacacaaggaaagcatcacccacaaaggcaggacattggatacccaggttagctgaataagagaaactcaaaaatgattttcatggctgggcacggtggctcacgcctgtcattcccagcactttgggaggctgaggtgggcagatcacctgaggtcaggagttcaagaccagcctggctaacatggcaaaaccatttttagtctctaataaaaatagaaaaattagctgggtgtggtggtgcatgcctgtaatcccagctactctgtaggctgagacacgagaatcgcttgaaccccggcagggcggaggttgcagtgagccaagattgttatcactgcactccagcctgggtgacacactgagacactgtcaaaaaaaaaaaaaaaaaaaaagattttcatgaaactaagcttggtaatcactatatatatacacacatacatacatatatgtatttttttttttttttgagatggagtctcgctctgtcacccaggctagggtgcagtggtgttattttggttcactgcagcctctgcctcctggggttccagcgattctcctgcctcagcctcctgggtagctgccattacaggcatgtgccaccacacccagctgattttttgtatttttagtagagacagggtttcaccatgttggccaggctggtctcaaactcctaacctcaggtgatccacctacctcggtctcccaaagtgttgggattactggcgtgagccatggcacccagcctattttttttttttagtaaaaagagtcttttgatcatattgttccctttcaaagctgctgccacattttgtttttattttttgagacacggtctcactccgattgcccaagctagagtgcagtggcacgatcatgctcactgaagcctcgacctgggcacaagtgattctttgacctcagcctcccaagtagctgggactacaggcacacaccaccacacctggctaattcttataatttttgtagagacggggttgtaccatgttggccaggctggtcttaaactcctggactcaagtgatcctcccaccttggcctcctaaaatgctgggattacaggcaagaaccactgcatctggcctgcttccatgtttttaagttacaattcaactctattgctgataaattttgttgtgtaggagatgcatgtcttgggttgactaacttaagagttactagctatggagtcccacagaatactaaaaccatatagtaaaccagtcttccagaagataatggatgtttcagttgtaaagatgtaaatttgtatttgaagtgttatcattggctaatataaaatagattttttactagattagcaatcaaacaaaaatttaattatcgaaagtcaattaagtactaaaacacacacatacatacactccctctctcacacatttcaaaaataagatgcaaggcacataagcagcattatatcaaaccagaatgcattaggatattgattatatttaaataattatttttctttttccttctgtaggtgacgatggcttaatagaatttaccacagttactttagagtctccgaaagcatggctggtggaggcctgactgggaggcaggggatgcgactccttactttgcaaaggctcctctgagccttttgcaacaccaggacttgattggtcagttttcaagacatagcctgatccaaagagttcttccatgagactgcttttcttatctctgaaagttgtatccttcacttttattctggaagacttaccaaatgagggctcatacccactgtcagaatgctctagctccatttcctctctgttactgagatgcttgcctgtactatgactgtacctcatgttgccggcattggctggcccccctgaagcaggaagcccatgatgcaggttttcagttgcttctgtgaatgagtaatgtcttctttgtctgagggggcctttcgtgtagggagcagtgcctttgccaagtgtgtcatccacaccatttctctgcatgcttcttttaaacttttctcttactagaacatcttcttgattgctttctctttcaggatgaataacttcaattatttttggtggtagttcttgctcttctttcacaaaaatgtttttcttttcttggtcttcttttttgtctttttgtcttccagtattctccagcagtatttggacttccaaatgtttctcttcccctgataaatctatattagaaaaataggcaatttagtgctgtttaaaatgaatggatctctatttcaagatggcatgtctagtacacttacgtgcaccgcctcacaagcacactgaaatgacagaaaaggtaagaaaatagatgcatagacaaaagattacagagaaaggtgctattaacaaatgtgttatgttacagtttcttggaacttcccaagcagatgggaattatgaaaccaaaagaaaaatgacattcatagaagaagaaataaaatttgccaataaggttattaatagatgtttaacatcactaactggacatactgccagttgaaacaatgatggctgggtgcagtggctcacacctgtaattccggcactttgggaggctgaggcaggaggactgtttgagcccaagagtctgagaccagcctgggcaacatagcgaaaccctgtctctacaaaaaatacaaaaattagctgggtgtggtggtgtctgcctgtagtcttggctactcaggaggctaaggtgggaggatcacttgagcccaggaggacaagactgcagtgagccgtgactgtgccactgcataccagcttgggcaacagagcagagctgtttcaaaacaaaacaaaacaaaacagaacagaagaacagaacagaacagaacaggacacaatgagaacatttttcatccatccaattggcaaataatttctagagctggtgagaagatggggaaattggaatgtttggtccccgctggtgggtgtgttgttggtacagcatttttggatggcaatttggcagtatcaagattttaggtgaatatactcttagacctaacaacttcttcttagaacgaacctacaaaaaatagacaaggataagtgcaacgatgttcactgtggcgtgggttagtaacaataaaacctcctaaacatctgccaaaggaataatggttaaataaggtatggcacgtgcagtctgtggaattccaggcagttattatagacaatgagctggatccatgtgaactgatggggaaggatgttcccactacagaatataagcacatgagggcagggttttgcatttgcttcctcctgtctccctaatgcctagaacagtgtcagacacatagtgcatgctcagaaagtatttgtcaaatgaatggatacactttctaggacactatgaattaggacaatggactgaaaaataagcagaaaatttaaacacaccagtgaccacagtgcaactgcaactgacgatcagtttccaccaaactgcaacagagagagtggctttgccggtgagttctgtcaaactactgtgttatttaaacattatttggccttacaactaaggtgaggcccttgggcctctactgaaggcccaatgtgttcaacaagggctctccatgctgcctaagggaacacatctgatttgcagccctgaatgaactctgggactcattcatcatgcatgtactttcctcagaagttgctcttacccagccttgcggggctgcagccagatctcccacgagtggtaatgtaacatgaaaacaatgagccacatcttcaaaattccaaaggaaaatgaccctcaacctagagtttcctatctaggcaagtattaatcaagtgtaagggcagaataatgacacttccagatgagaggtatacaaatttaccttacctgcacccatttacaagaagctagtgaaggttgtgctctttaaaacatgatggaatttaccaagaaagaggaggacttggcttaggaaagagaagatccagtagagaaggggagtgacaggaatctgcaggaaatgatgaagggcaatcccaggatgttagctgcacaccagagatgaggagacagactaggacccctgctccattagacctccaggtcccaaacaccaggtgagccagggccttggcctgtcttgcccatggctgatgaagtgttgtactctctatcaaaccctgcagtctgggccagctgaggactctccttggaacccaaagaagcagtttgtttccacctactcccaagagctgaaggtaagctttggtgatcttagaataggaaaatctgggcagcccgttctcttggccctagctctcttgggcctgcccagaagagctctgccagatgccatggatctgagggtttttctatctcccaggatgattcaggacctcacccactgattgggcccttgtatattcaagggagctgaagctggggtcctttttctggaagtctttattcaaaagtggtaatattgccctttgctcagctggatttgaataatttgctactcagtttttcaaagctgaatatattatttaaggatactattatgaaatgaatgtttgtattccttcctcccaaatttcatatgttgaagccgtaacccccagtatggctatatttggagactgggtctttaaggaagtaattaaggttaaatgagatcacaaggttggggccttcatgacggaattagtgtccttataaaaagaaacactggagcactggtgctctctccccgactctcctcgtgcgagcactaaggaaacgccacatgaagacatagtgagaagcgggacatctaaagccaggaagagggccttaactgaagccaaatgcctagaaccttgatctcggacttcctagcctccagaaccatgagaaaataaataagtgttgtttaaaccggcagtctgtggtattttcttatggcagcccaagcagacgaatgtagctacatataaagacagggagctgtgagggaaagcaagggaatgactggcctaaaacccaagacggtggtggtttctggtgggcagggcgaggggatatgattgtgaagggcccaagggtgttccaaggagtactcatccactgtttcttaagcaggctactgggtacataggtgttcctttcattataattctggaaacggttttatgttttttttttaattttttgagacagagtctcactctgtcacccaggttggagtgcagtggcacgatcttggctcactgcaacctctgcctcctgggtccaagcgattttcctgcctcagcctcctgagtagctgggattacaggcacataccgccatgtgcggttaagttttgtattttttagtagagatagggtttcaccatgttggccaggctggtctcaaactcttgacctcaggtgatctgcctgccttggcctcccaaagtgctgggattacaggtgcgagctgccatgcccagctgttttatgtgtgctttatatacacatatagtaattcacaattttaaagaaatcagataagatagactttaaagagttaaaattaccttcatattttctcttagaatcctcttgctttggtagtttattcacacagtgaggaatttcatgatttatttcagttgatttttctttatgatcgatgtttcctgttgcctttttaccctgtaatttagaaaagcagcaaaaacacattttggggggtctagataacttaaaattgcattttattctaatgactacaaatacttttcacatagaacaagtgactgtagcctatttttgttaagacatgtttaatcagacactgcaagattccaaatttgctgtaccttagttgtcaaaggtggaacatctgatttttgggttccctggtgtctcatacttgtgaatggcaaaatttttctgtctgcttggactgattttgttgaagaaactatggaacaggtagattatatgtaagaaacatattttacatttggatacaatattgattttaaacataaaataacttttatgcaatgtaataataaagtatactaagtattttctaaatattcaatatatatataagcatttgttagtttcctgtttttccctccagggcccttgctttgtcttactttgggcctcacagtgtttgagtataaaacaagtaggtgttaggataagacattgttgctgttggaggacaaggctgtcctttgtggatgggattcagcaaggtagacgtgtaattgtgagaggccaggccaccgagctatcctgtggcggagctcttgattatcagtggttagactgtccatgctgaagcgcatgaccactaaatctagactgcactttcctgaaaagtgaaggaaattatatcatttaaacaacccctcggttgattcattgtctctattattctagattataagccagaagcaaacaaaggcaggcaaggaaatttgaggttgttgcatctggaagtaaacatgtagctacttcttctaataaaacagaggtgagtattcctatggtacttctgagtcgaatctgttgctgggagattttggggggaaagcagtgcacgtgctcttgaagaaaagaagacctcaccaatgagaggtatacactaatgatagtggcatcaatatagatgaatctcaaaaacactatgctgaacaaaagcagccagatacaaaagggtgcagctgtgggattccacttacatgaaattctagaacagacaacctaggctattgtgaccaaaggaaagtcagtggttgcctcgggtgaggtaggggactactgactgcaggggacacgaggaaacttcctggggaggtggaaatattcaatatcttgattggggtggtggctccatcggtataaacatctgtcaaaacccactgagctgcgtgcacacttaaaatggatgcattttattgaggtcaagtataccccaataaagttcattttgaaaagccatacactggctaacagatacacttagaaagttcactttttggcagacattttgcttcaagctgaagttatccttttgctccacctgaagaaaggacataaaggggtgtgctgaggatgggagaacgggaaagcatttctattccttgctagccatgtcaccatctcagtctcgttattcttctagaatcacaaaatgtattttaatgcctaatgaagtgatttttgaaaatatccattattttgtctatataaattaggaaaatctgactagatacttaaaaatagattttgagcaaaagtaattaaaacataccttttggatagtcctctgtgtcatgtaaatttttaagtattcgatgactatagatgtttttaatttcaagctcacgatccttttcctaaaaagaaccacaaaaccaatttttctataaatgcttgcttttgtcaaccctgatttcttttaaaaacaatttaaatgagctcagtatcctatgaataaaatctgtagattttagaagaaacagaaataggccatatcatcctataccattcctgacatcgaaaagtactagctctttaaacaaagtgacacattattgtgatcgggacagtatttttgaagagccttgcaggtcagcttgtccactgttttccttctgtcctgtgggccttgaagtttatgaaatattcttctgtactgtgcattacagtagccactaactatatgttgtgatttcatttaaatgaaagtaaaactaaaatttaggtcgtcagccacactatttgtatttccaataggcggtcagcagctgtgtgtgactagtgactacagtattggatggcacaggtgaacatttccaccatctaatagaaagttctatgagacagggctacgtctagacaagggccgggggggaagcctagaacaagggtatcattgttccattttaaatttcatattgatttttttgagtcttggcaaaacagacattttgaaaccttaacttgttgaggaacaaagaaagggtttttattaaatatcaaatgctccttcttacatgtacaccaggaggcaagaaaggctttggactcaagaccattgaattttagtaacaaccatggttaagagaggtgggcatatatgaagtaaggaggaaggaacccagggatgtcagagtgtgacagacgtgcatgtgcacacacacacacacacacggggggtggggcggggagagagagctcttgtctccttgtgccccttagggtcaaatctatgggccaagggatattcagggggtgagaaacatctctgaggtttgggaaagtctcagtgcaagaggccttggcgtggtccaggaaaattgcaagccccttaaaaagcgcctcccccgccgccccattcatcatggagctaaagtaacatggtattgcccaagtgtaagttagaaagggctaaataccctctctaggccagagattgtgcttcccttacccttgcaaccagtgggacctgtggagggagctgcacctgccctggagtccttaaggttacagatccaggtgctcccatagcacaggctttgcaacagagaatctagccagggatcagatggaggatgcatctcagagcatttgcatcaacagtcagcaggggacaatcaccaggatttatttgaccagactgagaagaggccaggagttttagcagccacattcagtacacatcagacagggtcctgggaatttgatttaagactagtcactcgtcaggagaaccagctctagagaggggccagagggcagaacacagaccagaggcctctttttcactccaccaagagtacacatatgttttctctcatgcccaggatgccatctccactgagacagaagatagggatgaggaaaaagtctgcaagtctaagagacaacctagcataagactgttttgagttagaagagactgagacaagcttttatccatttcttcttgtccaactgccatcctcatccctaatttgtgggactggggctcataaggaagtatggcttagttacagaaaataaagaacatgacatatttttgtacctgaattgtacagtgtaaattttctactcatttgaatcataaaattagtttattatcagaggtacacaaagggataaaacatgagaatattaatcttttctagaatttaagtttctggaggcaaaaatgttaacagttcatctctcttttcttattgtggtaacagccaaaagaacagtaaatgctgacagttcatcaccatgaaaagttgatcaggtgtattctggataatagctttcagatgaaggatactgtgtaaaacattttagaatgagttttcatccacactggttaggaaacattttcatgtttacagggacacattttgattacctgaaaaattcagttctatcttttgatttggtctggacacctggaggtcagcaaccgagagcaggaaggaggcacagcaacaacagaacaacaacaagaggctgcgacaggggcggcgtgggtcaaaaggaagcaacctggaggacggtcctccttgcggcttggagcagagcttcaggttgggcaccacgacagagctgggccagaagtctaacacagcctgtttggaacacaacccgggatacttgtgtggttgggttcagtcagtcaagggaaacaagaagctaacccgtggctgggagtgttcatgcaatgctcgtggaatactcagcgcaaagcctgcccgcaagcacaaagggtatcaaggaagagttaaatgggaagttgggtcatggtgtggaatcatattaaggtcagcattgatggcttccggaacttagatagaaagcagtgtcttaatgcaggagtgtgaccgtagcctgggtgtaagacgggtggcagtacctcacgtgggagctgtggaaggctgacatccctcttcttacttcggctcatactgcagaagtgggcctagaactcggtgtgggatgactttgaaaatgagtttcaaagtaaagaaacgaacttttgacctttgggaccagactcttccaagctcaaactatgactttcgttaatgtggcagactgtattttcctagaattcccacgacaagatttctagtcctatatgctcttcaacaacctcgtgactcgctaccaaaaggtggagttcactgcttgaactgcctaggactgccctgacaaatgctgtgaggcagaagtgatgctgcgtgactgccaaggctaggtcataaaaggcagtactgcatctgtctggttctctccctctctctctctctctctctctctctctctgtgtgtgtgtgtgtgtgtgtgtgtgtgtgtgtgtgtctgtgcatattttactttgtgattgtctatgtttggtttcattaatctacaaaaaagaaaaacccctttttatcttccagaaattctttgttagatctggtagttttggtattcctttctggtattctggattattttatttatttttagagacaagagtctctctctgttgcccaggctggagtgcagtggcgccatcactaaagcctctaactcctgggctcgagatcttctgcctcagcctctggagtagctgggattacaggcttgtgccaccatgcccagataatttctaaatttttttgtagagacaggctttgttctgttgccttggctggtcttgacttcttgggctcaaaagatccttctgcctcaacttcccaaaaaatgatgtaagccaccatgcctggcttggagtgttattttaaaaataacattttctgtcatttccatggggctttggcagggagggacaaaaagcatgtgttgaggccaccttcttgatctagccatttctactcttttaaaaatgcataaaatatgtaatttcaaaagcatttttccctttgaaactttattatacaaattaaaatatataaaaaaataaaagtagaatagtacagtaaacctccatgagcccatgaaccagctttactaatgaacaactcatgtgctgtttcccactctctctgaccactccccagccctggcttatttgaagcaaatctagacctctaataacttatttcagtatctgtagcaaacaagggtatcccttttaaaacctaactgcagtatcttcattccacttcccccaatcaataattccttcacataatcaaatatccagtttgtttaacattttccccattttctatagtttttaaaaggtttgtttgaattagaatctaaacaaggttcaaaacactgcgactgattaatatatctcttactgtcttttaatctatagattctcactctcacctcttattttttctgctttgctatttaatcgtagaaatgggggtatctgtaatgcagtttcccacagtctcatgctgctgactgcatcccatcctgagcatgttcctctcccctcttcttttttcagttggtaggtagagcccagtctgtaactaggtttaggttcggttcgttggcatgagtaggtggtggtgtgtacctctgtcaggaagcgcgtatctcttatgtgatactaggagccactgatgatcattgattagagccactaattcattaggagtttccaaaatagtgacaattctaatcctgtcattccttcttcattattgagtggaatgcttttataaggaggatcttaccccctcacaaacgatttggttactctgaggagtcgttcatacagggaaggtaaaaatgtttgcttcttgtcctctactgaccagtcttcaagacagcatgctgttccctagtatcctccacaagtgactcatcgctgaggtgtttagtcttttaagtatcattatgaagtgtggattcatttgataagttttaacctgggcagttatctttattgatcctcaaatatccccatctttggccagtaagaacctattctagatgggcctgagtccttttgatactaccctaatggtccttaatagtttctttgcttttgtatgacaatacgttccaggttcatctagtgtatttcctgcaccagacctagaatttttttagggagccttggtttgtttcagtgggatatggaacttacagaccataatctgggtgctggaggtgttcattgctcctggttactctgagaatattgcatactttcacttcagatcaaaatcaggactataggatttttatttgactctatcttacttctgtattttttttttgtccatcccccaaatcccagttctcaatgacaacaccataatctatcaggagctttatcccataagatacacacaacattctcaaaacaacaacatcaacatcattaccaactatatcattactaaacagtgtaagatttttttgtaaagttatttgtgtccttacagtgtatctcactggccatatgcaatgacattatgtgttttaagtcacttggaatggcttctttctgtggctttgtgccaccaataggatacagtcagcgttccctgtctgcaggttctgcatcccgcggttacaaagggctaactgtatacacatttgggttcatctgcattttactttggatatttagggatagctttttattttatttttgagacagagtctcgctctgtcacccaggctggagtgcaatggcacgatcttagctcactgtaatctccgcctcctgggttcaagcatttctcctgccccagcctcctgagtagctgggattacaggcgcgcaccaccacacctggctaatttttttatttttgtatttttgtagagatggggtttcaccatgttggccaggctggtcttgaactcctgacctcaggtgatccgcccaccttggcctcccaaagtgctgggattacaggcatgagccactgtacccagctgctttttagttttttttacgtttaattctgctttgtacttatggaaatattttcatggttccataaagatattcatgaaatctaggttctagagctgtcccttctactctattctctctttttctgctgttatcctattactggtttattttttaaatgtaggcaaatagatggatatatttctattgcttcctttatcttaaataggattgtattagtcctttttcaggctgctgataaagacataactgagtctaggtaatttataagggacagaggtttaatggactcacagttccacatggctggggaggcctcacaatcatggttgaagacaaaggaggagcaaaaggacttcttacatggcagtggacaacagaggacttgtgcaggggagcttctttttatttatttatttaattttttaatttttaatttttttttgagatggagtctcgctctgtcgcccaggctggagtgcggtggcgtgatctccgctcactgcaagctccgcctcccgagttcacaccattctcctgcctcagcctcccaagtagctgggactacaggtgcccgccaccatgcctggttaattttttgtattttttagtagagatggggtttcgccgtgtttgccaggattgtctccatctcctgacctcgtgatccacccaccttggcctcccaaagtgctgggattacaggcgtgagccaccgcgcccagcgggggagtttctttttataaaaccatcagatctcatgagacttattcactatcacaagaacagcatgggaaagacctgcctctatgatctaattacctcccactgggtccctcccctgacatgtgggaactgtgggagctacaattcaagatgagatttgggtggggacacagccaaaccatatcaaggatattacagtttcgtttgccttcctttcttcacttaccagtgtatcctagagattattccatagtagtacatcaagattcttcattgctgtttacagatatatagatatccattgtgtggaggtacatttaattttctttttaaaaataaatttggatcttactgtatatagaattttctatcttttcattaagcatttcattaagtattaagcatttctctgttaaaaatggttatttttattttattttttttaaatttttttgagatggagcctcactctgtcacccagggtggagtgcagtggcacaatcttggctcactgcaacctctgcttcccaggttcaagcaattctcctgcctcagcctcccaagtaatgggattacaggcacgcatcaccatgccaagctaatttttgtatttttagtagagacggggttttgccatgttggtcaggctggtctcgaactcccaacctcaggtgatctgcccgcctcggcctcccaaagtgctgggattacaggtgtgagccaccatgcctggccagaaatggttttttaatggctgcatgttattcatattcatatgtctgcatgaggaagcataaaatttattttaaaattccccaattgtgtctccatatgtgtgtgtgtttgctgtgaccaggggatcttgaagtctcttctgttagatttctcagctagctgcaatagccatgcctatgttctatgtattctttttgaagtttcctggaactccacagaaaaaaggaactcttttttcttctttacaaagggaaaattttctttctttcatcctccaaatcccagttctcaatgataccaacataattcatcagatgaattatccaactcgtccagctccgccccaactcctcaccccccactattcttctcctgtctctgagtcatctcaaggctcctggaaaatctaaattgcctaattgtcacaaaaaagttaaagatcaggctgggtgtggtggctcacacctgtaatcctaacactttggaaggccaaggcaggaggattgcttgagcccaggagtttgagaccagcctgggcaacacagcgagaccccgtctctacaaaaattttaaaaattagctgggtatggtggcatgtacctgtgatcccagctacttgggaggccgaggtgggaagatcactttagcccaggagttcgaggctgcagtgagccaggatggtgccaccgcattctagtctgggcaacagagcaagaccctgttcaaaaaaaaaaaagaaaaaagaaaaaagaaagaaagggaaattattgatatagtgctaaatttcttatgttaatatcctagcccccatagtgatacttttacgacgtgggccttttgggaggtgattaggtcacaagggcagaatccttgtgaatgggattagtgcccttgtaaaagaggcctaaaggagctcatttttgccttccttaaaaataaaaaagttaaagatccttgtcttaaagaatcaagcttaagatttattagttgaggcttgaaacagcgtatttcttaagcatcttatctaaattgttggacattttaccaatcttgaaggcagaaagatagcaaaaagcctgacaaaatattttaaaaattcttatttttaaagcagtatacatatttttaagacagtttttcaaacacatttttaagtaaaactaagataaatttatgagtcattaaaatttatcttaaatattatgtttttaaacgttaattttgagttacattaaaatgttaacaaacgctgtattacttaacgtgatgaaataggaatgctaacaagaagccttgttaatgaatagagtttctatttttctaatgacagtacacattcgccaagctgttaactcattctaataattgcagatcctttgtctgttcatatgattgtagagaaaatatctgagaaagatattaatgaagttacataatttaggccaggtgcggtggctcacacctgtaatcccagcactatgggagaccaaggcaggtggatcacttgagcccaggagttcaagaccagcctggccaacacggcaaaagcccgtctctactaaaaataacaaaaattagccaagcgtggtgttgcatgcctgtactcctagctactcaggaggttgagataagagaatcacttgaacctgggaggcagaggctgcagtgagccgagatcatgccactgcactccagcctgggtgacagagcaagattctatctcaaaaaaaaaaaaaaaaaaagataaacagaactgtggatgggggcccaggccccctacaaagggtagaggagccttatatatgtatgtaaaataaaaaatcacttaaagatataatagacataaatagctcatatatttcgggaaacaggatttcattcttacattttgttttaaaagaaataccttaagtttttgttgaaggtgttttacttccacctgcagagtcttggtagctgtctgagctgctaaagtcttccgagtctcaatagccagctgccggctaaaggctctgcagttcaacctcagttgtttttccaagctctgaaaacagtatatattataactattctgcaaccaagttagtatgttaaaaacttcaattatcatggaactaactacatttatgaaaagtgcacattttcaatacaattttagtgaatgacttatacaggggacatatattggaatgaagtataaccgaaagaaagaccccaaatcccagatcccagctctagagaacaaatatcacacgtttggagcctgttttttacatactctaaaatttgatttaacaattcgtttttttttttttttttctaagttggagtcttgctctgttgcccaggctggaatgcagtggtgcgatctcggctcactgcagcctccacctcctgggttcaaacgattctcctgcctcagcccctgggtagctgggtttacaggtgcacaccaccatgcctggataatttttgtatttttagtaaagacagggttttgctgtgttggccaggctggtctcaagctcctggcccacctcggcctcccaaagtgctggtattacgggcgagaggccactgtgccctgcccgatttaaacattctgaccagatcctgaaaatcagtagacatcatggatgggcattcccagacaacagaaactgaatgttataaaagggactcaaaccaccacatccatccacactgatggactgtaagacaatgaaatgactgatttaattcaataaccatccataaatatattcatctgctctctggaatgagaactattttattggagaactgttagatctggacttgacagaaagcttaccaaaaggaccacttttctttgttttaacataaagtaggacctcctccattataacagcagtactttcccaaacaggaaaagtggaagacatggaaagctacaaggggaaagaatcactaaaaataccactccctaaaacattaatgttaaagaaataacatgttttggtccacaaaacagttttcctccactaaatgcctacaaccaaacagaaatttctcatacttggtaagtgctttttgtatcaaagaaaatagttatggaatttgttttggttttatgtatagatataaaaacatgaacaacttagatacatacatgaaaacagatttgcttttacatgacagacatacgctaagatgaatacaatattacctaaaaggcccaataatatcactttggtatacaagagtgaaaattgaggttgctcattattttctgtagatcacatattaatttcatgtgaaaaaaatttattggaaaatagggaattttaacaacagaagaaataactgagattaaaacgtggaggaaacgaacctgatatttacttacttcaagatcatagaaaatactcgtgtttcagcatcaaatattacagaattaaatcctaaattaattccatttatgtttatgtctatacagactcaaactagctaatgtaagatatgcaggagaattcttaatatgatatcaatgccttctcccaagtcatcccttataatgtaatccccaggcttttgacaaccaagtgctgttgaggaaaatcaatccagtcatctctttaattattttaattccttttccttccctactacccaggaacattatctgggaaaagctgctattttgaaaataactacaaatgtctgtgtggtaattcctggccaaaatggtgagggagaatacaaaggccctgaacggatgcactgagtaggtttttagggaagtagccttttaatcaacagtttaaggtagagggttgacttcaaagagaggtttcacgtaacacaatgcaatcttttcagcacagggaaaaagtcccttagcactgtagctgtgctctcttagagaatggtcatttccagataaaccagtccagccacagagtgaactcttgtgcactgcaacagatgaacatttctagtttgagctgcttctgtttttccttcaaaccactccctttctgtgccctctattagacaacataattatttagtgcagcacgccaagtgaagcagttagtaatgctttgttacagagggggcgcatccatgattaattcacaccctctctctattaactttggaatcttaaactgtctgggcccctgaaatacagacctgtatttttttgtcatttgcgtccatttttgttgtgataatagataatttatgagtgagttcttccctttctgcaaggtttttgtcttcagaaagtttctgcagtgcctgcaagatatctttagtcttcagtaactggctgtcagtttctctaagtttcctagatagagttctttccttttcctgggatttcctaagtagttgccttaaattttttacttcattctgatgtttagccataatttgaggtagattattttgtgaattctcatattttcctatagctttcaaatgcctaagctgaagttgtttcaaaaattggttttctgtaaggatggcttccaatttatgatgcatatcagctaattcattttttagtcctttaattttatgaagccttgctgagagtattcgatgagccatagcatctcttctttgggcaatcatatggatttgagaattaaagagtgatgcattccaggtgtgctttttttcaactgatatttccttctggcctgtgtaagcagaaaatccagtttattactagtaaaatatacagatatgcaaatatgcacatatgcataatctctctcccatgcccccatgcacacacaccacacacatacacacaagcgtaagtgtaactagaaggggacaaaactatcatttaatgaatacccatgctttaggctaggtactttatatataactacctcatttaatacaattctttaagatcagttgtaatatattttatagctggagattttacatcatttgtccaagattacatagccacgaagtgacacagaatggattgaaaaccaggtcttctttgactctaaaatctgtacttagatttctattataacagctagactaaaagctgtgataataggccaggtgcagtggctcatgtctgtaatctctacactttgggaggctgcagtgggaggactgcttgaggacaagagtttgagaccagcctgatcaacagagttaagatcccatctctaaaaaacaatttttttaaatgtttatttttatttttttttgagatggagtctccctccattgcccaggctggagtgtagtggtgcaaccttggctcactgcaacctctgcatcccgggttcaagcgattctcctgcctcagcctcccgagtagctgggattacacgtgtctgccactatgccctgctaatttttgtatttttagtagagacggagtttcaccatgttggccaggctggtctcaaactcctgaccctcaagtgatccaccctccttggcctcccaaagtgctgggattacaggtgggagccattgtgcccggcctctacaaaattttgaaaagtagcctaacatggtggcacatgcctatagtcctagctcctcaggaagccttggcgggaggatcccttgagcccaggagtttgaggctgcagtgagctatgattgcaccactgcattccagcctgggtgacaaagtgagaccctgtctcaaaaacaaacaaaccaaccccatgacaatagctgaaatttactaagtgcttatcatatgtcaggcattaaactaaatgctttctgtagattatctgatgtaatcctttcaacaatatgttatgggtaattagagtataacatgagaatccaatgtaaagaacttatatattcaaaatgaccctcaaaaggtcatcaaattgcataagagtctatctgtttatacagataccgattttccatctctcaataaatccaacacagttaatttttcctgttactttggctgggcaccaaatgaagtaattggcatgtgtccaggggtctatcttaaacaaaaagtctctaaaaattatcagttagcaccaaacttacctaattgaatttgagtatgttaaatacatttgtaaatcactgtactattatcccattttaaagataaacacatggaagcttggggatgtcccttgtcaatgagcacacagctaggaagtggtgagacagagcccattgtctatgtgcctatgctagtgccccacaggtgtgtgcatttgtaggatatagaggtatatgtatgtgtgcacctgtgtatgtaaatgtatatgtggtgtgcaagtgtatgtattcatatatctagattcggagaaggagaaattgaaactggattctaaactctaaaaatgtctgatcctcattctggagagggaaggacacttagtggccagtgtcacccaagtcctaaccttaaactactggtccaagtgtggacacatctgagatgtggcttaatatgtctgctccaggtggtgggaaaggcaattctacctgtgatagaaacaatgaaccaagagagccaaagcatgctttctggggataaaacatttgaatcataactatgaaagaactcatagattatacaacacagtataacatcaataactggtggcctgtctttgcaattataccttcaagtgtatttattttcccatggtttagtaggggctatggctgaatattaagtattttagaataggcttctgagcacagtaagtggaaagcagagcaggccagcctctaggacatctactagaaggcctgcgaagaggtgtctgtggttttgttgaggccgtacactttaatactctgggcactggctagggaagctctagacccaggccgtatggatcaggctggtttaaaacaggggtgggcgaggactgacatgttctacactatggccagcatgactgaacctgacccccaacttgtaatgtcttccagctcttaggtgctctgaccctggaggagagggatttcactgagatgagaaggatgcgtgatgggatccatgggcactggaggcttatatttccctctcatgccatgctcaagtgatgggagggcagaggcatgagagggtgctaagggactaaacgccatggccacaggagctctggccaaggccccaggagtcaagaagtgcacagagggcatggatgcgttggaaaggggaggtgctggccttttaaagatcatatggcttggacaaggaacatgtaagtggtaaaaatgaagggcagaggcttctcccccagtattcttctttgtgtgaggccctttccatgtccctgccccctcatattcccttattccccaaacgtgtctgagattgactttcctgtctaccctagtgagtgggtggggaggacaagccaggtttgttggcttcagaaaggtaagtacaccacttgcatttgaggggtatgtaacaaattcatactgtatccatcacgcatacttgatggaggaatatatactccaagagtaatcagctttaaaaagctaaattataaggtacttagaattcgaaatgcaatttctctcttgtagaaagttttataaatgccaactgccctcttgcatgatcccacaaaagcttaccatcaatataaaatgtagtatatagattcaagatctcttattgtaaacccttggaaccagactgtttcagaatttgggggtgggttttaaaggtgagtgcatatatggtattttccacagttctctcattggggtctggaacaacaccctttaatgaaactatatttttgcagtgaaattataatcactattcacactaagtgaaataactaaagatctgcttcatattagttcaaataaggtttttgttgccaaatcaactttgatgccaaggatatgaaagatgttgggtttttggagatttgtaaatttcaaatgtggataaggaattgtgtgtttgtaggatctaaccatgatgttcatttttgatggagtccaggcatgagagaagtactggacttttcatttcctgccctgggccttgccagtggaggtaggacccccagctctctagaaaagtaacatttaaccttttgagactctgatgaaaggtacagggccgtctagaaaagtttacaaacacacatagacacaaaaaaatgcatagaatttcatggggttcacagacatgtgtcttagataaagaatccctgtgctatagcaggggaactgaagattctgggtgttccagaagtggcacagagggtcctggacacagctggtaacagcagactggggatgcaagatgcaaggtggacatggcggtggcagatgcactccccaaacagcaggccctttattgtcctcctgttgactgaagtgctctgatggtcaacatggacaagagccccagctgtttctatataaggaatacttatgagctcaagattgcctcaaatgggaggaaggaattacagtctgggcagggaaggaggaagaaaggagatcaaagataacacaagctaattccaatttggacagctgggagttgatagagctggtactttaaaaatctacaaagagccgggcgcggtggctcacgcctgtaatcccagcactttgggaggccgaggcaggcggatcacgaggtcaggagatcgagaccatcctggctaacacggtgaaaccctgtctctactaaaaatacaaaaaattagccgggcgtggtggtgggtgcctgtagtcccagctactcaggaggctgaggcaggagaatggcgtgaacccgggaggcagagcttgcagtgagccgagatggcgccactgcactccagcctgggtaaccagagcaagactctgtctcaaaaaaaaaaaaaaaaaatctacaaagaaatgacattattaacagccttttgaaccatctctgtttcaaaagatggtgtttgccaatatgtctcaccagacttggagaccatcctcttggggtgctgagataggtatttacatttcactggcaattcaaacactgattcttcagctgagatgaaaggcaagaagccagtgaaatccaaatattgtggtactctgtaacaaggccacctgttaactaaaaacagaactaacctcactagtaggctccagtagggtaagccatgcagggggctaggctttacatgtgaagcctttctgttattttataattactcttaatttctctatttcctaatttattctataaaagttcacctataatacacatttacaatatgggaaaacaataaaactgagtatgaaccacttcaaacactagtgcagtaaaataacatcattatgacagaaatttggtcttgcttgggaaattttactccttacctttagattgggagattttagaaacattatactttttcttctccttttcttttaccacaggctgctttaaataatttctattaatagccttttctgaacaatcacagagaaagtcttctgaataatcatactgagaacttaaacttccacaggagcactgagatctgctataatcaacactcttattggaagcattactgttccgtgaaaaatcgcctgtgcctgggcttctcttgcatgctgcagacctcctattgttttctaatgccacgccgaagaaatgctcatctatatttgtttttgttagatcagccaaagacatagcaaacaacctaataaaagaaaagtaaaacctaataaaagtatttttgaatttattgacattaaaatgaacctatgctttattttatatatatatatatatatatttttttttttttttttttttttttttttttaaagacagggtgtcactctgttgcctaggttggagtgcagtggtgtggccatggctttctgcagccttgacctcctgggctcaagcgatcctctcagctcagcctctggagtagctgggactacgagtgtgtgccgtcacacctggctaacttattattttttggtagaaatgggagtctcactatgttgcccaggctggtcttgaactcctgggctcaagtgatcctcccaccttggtctcacaaagtggtgggattacaggcgtgagccaccatgctcagccatggacataaactttgaatactttcaataagccctcttagttgtctaaagtgataatttaaaatggaaggaatagaaagtgaaatacaagaaagaccccaaatttatacccttaataaaattaacattagttacaaagcagatggttctgcatttctttattatgctactgcactaaggacaataccaccacaagtatctcttttatagcagcttacctcaaaagcagattgaaacaaacagatccatcttctgaggtctttaaaaggatttaccttttcatttaattctcaattctcctgttttatcaagaaagcaaaagagaatttaactggcattagatcctttgcaataggaatctaatatcactttctctactgagagggttttttttgaagtcagtttctgctttttgctgcatctgcttaattctccagccttctcttctgatgaaatatattaggcagtccacaatctcctcactacaagaaatcaaatgatcttagtaataattaatattagcattacacttaatatctaactagtgctcttactttgtacaaacttatttcacatcacctcatctcagccacctagagggaataggttcagacaggtttaaagttcagagactgtccctgtttcttagctccaggggcagtgcttttttcattaagcaccatgactgcaacaccacattggtgggagcattacacaatcctaaggcaaagaatttctctttccagacacattctgctgtgtagcggtgggcagaagcagatccttatttgtgaacctttgcatctagattaagaagaatccaggctgggcattgtggctcacatctgaaataccagcactttgggaggctgaggtgggtggatagcttgagctcagaagtttaggaccagcctgggcaacatggcgaaaccgtctctacaaaacaaatacaaaaattagtggggtgtggtggtgcacacttgtagtcccagcgacttgggaggctgaagtgggattgcttgagtccaggaggcagaggttgcagtgagctgtgatcgcggcactgcattccagcctgggtgacagggccaactctgtctcaaaaacaaacaaacaaacaaacaaacaaacaaaaacaaaaagaagaatcccagatgttggtgtaagggaccctgaaagactacaaatgctcccgtgtagccctcatagccttgcctgtccttgtccccaggagctgttcctccctgccctcttgctcatgacctcagtccctaatttcctcctcacctatcttggtaaatccaaatggctcaaacaatggttgctaatccgcaagaagaatttgtttttttggccagttgtttctgactcaagctagagttcggctgacttctgctaaagcccctccttcttcctcactttagaacactccttcaacaagtcttcttatgcaggcaattttggataaaggcttaattcaagagtgtttttcatgttacattcacaaattgtccagctacagtagtgggagggagtgggatggagtagaaggtgatggacaatttgaaggcagaccggcttgggtttgaacttgggtctgcctgtcacttaagtgctcttgtccatctgtaaaatgtgagtgacaccaccaatcccatagggttgagaaagaaaagaagcttatctgaggaatgcaaccccctttaaatgaccaggcccaaagaggcactggaatgagacagcagtcacgtccccccatccccccagctgagctaagtaatcatttctaagctgcttgctccgtgggctctgactgacaccaccaatagctataaattaacctaacaatgccatatgctggacaccacagctcataccctgtggttcaaacaacaatctaatcgccagtcactgttatttctgtagaccaatgagaattcctgaaaaacgacgtttgcaattgtccctctcctgactttgtccttttttctttaaaaaatgcaagcctctcacagaagactaaagtgaacttcaattgtcccatgtttgataaagtagaagcctagccatcttagtctcttagtttaataaaaattgatgtaacagccaaaaaagaaaaaaaattccaatggaaatcctgtagagccacataagaataaacaagactataaataacttcactcttaaaacaattctaccagattaaaatgtcccctaatgaggctttctagacttagctgtgagaaaggtggtggattggaaggtgttaccgccctctccacgtggatgtgcaagtcataagcctctgtggatgctgagttgtcccattacctactggctccagtggatgtctgtattttgcaggatccttatagctagaagtaattgtagcttcttaaaaatgcttgaaaaatcaaaaatctgtcaatgtttcagtgagaagatcccttactagcaaaattatccacaatctttcctgctcaataatttgcctagcctaacgttagggatctagtttcctcaggatgggcaaagggtggtcttaccataaagacaattttttttttgttggtggaatggatgagtagaaaatgactgctaccaattttatttattttatttttgagatggagtcttgctctgtcgccaggctggagtgcagtggcatgatctcggctcactgcaacctctgcctcccgggttcaagcgattctcctgcctcagcctcccaagtagctgggactacaggtacgtgccaccaagcccagctaatttttgtatttttagtagagatggggtttcaccatgttggccaggatggtctcgatctcttgaccttgtgatctgcccgcctcgggctcccaaagtgctgggattacaggtgtaagccagcgcgcctggcctgccataaattttctagtggatgtactgtcaacttgcttttgtcaaatttctaaaacacatagtataaggcagtgatcaattctactattgatcactactataacctaatctgtctcatgtaaaaaaagctacaagcaacttcagattaattgctgtgttcaccgatttgtcttaaataggcaaaaatatctgaaaatcaaaaatcataatttcaatccatatcctaagacactgaatttttgggagcttactaaatttaaaagttgtcatgaatgctttatagagtatatttagatgctatattcttttgaaataatatatttacaacttggtaagatcagtgtataaactgactggcccagtgtttatcacagcttattaatgtcagtgtcactaaaatcagcttttaggtaaaatcggcttttaggtaaactcagtatgcttctttttgctacaacaaatagacaattgtttttaatattaatggcatagtctttgacaaaaagaggtcataagaaaaactgggaccagatgataataacacttaaatgaattttgtacctgattcgctaacattttaaaatgaagattttaaaaaatgtatcaaataggtcaatttatttggcttactgagcgtacatatttaacacaactgattcctaagcctttgggatacaattctttatttttaaccctcttttattgaggtatcaaagaaaattagtaagagtaccatttgataagattagaaatgtgtatccccatgaaactatcaccacaatcaagacagtgaacacaaccacataatctcccaaagcctcccagcaccccattgtaattcctctcatccttccctgcgcctcactcccaacccaggcaaaccctgtttttttgtcactatcaattattttgcattttatagagttttatataaatggaataatccagtatgtatttttatttggttggcttctttcactcagcattattattatgagattcatccatgttactatgtgcatcaatatcagtagttcatttgttttgtttttaagttgctgagtagtttccaattgtatgtataaaccataatttgtttattcatctgttcacagacatttcagctatttccagttttgggctattacaaataaaattgctgtgaatattctggatataaatcctttatcagatatatgctttgcaaacattttctcctcatctgtgatttttcattctcttaaaaatgtcttttaaagagcagactgttaattttggtgaagcccaattatcaatttgttctttgaagaatgatcctggccgggcacggtggctcatgcctgtaatcccagcactttgggaggccaagacaggcggattgcctgaggtcaggagttcgtgaccagcctggccaacaaatttaaaccccatctctaccaaaaaataagaaaattagctgggcgtggtggcgggcgcctataatcccagctacttgggaggctgaggcaggagaattgcttgaacccaggaggtggaggttgcagtgagctgagattgcgccattgtactccaacctgggtgacaagaaactctgtctcaaaaaaaaaaaaaaaaaaaaaaagatccttttggtgctgtatctaagaaatttttgcatgacctgaggtcacaaagatatcctcctttctttcttctagaagttttactttaaatctgtaatccattttgagttacttattatggattaaaattcattttttggtatatgggcatctaattgcttcagcaccgtttgttgcaaagactatccttttcccactcaattgcctttgcatctttgtaaaaacccagatattcatatgttgatctatttctgtgctctctatactgttctactgatctgtttctctatattcataccaataccacactattttggttactgtagctttttttttttttttttgagagagggtcttcttctattgcccaggctggagtgcagtggcacgatcttggctcactgcaacctccacctcctgggttcaagtgatcctccctcctcagcctcccaagtagctggactacaggtccatgccaccacatccagcttttttttttttttttttttttgtagagacagagttttgccaattctcctgccttggcagggtaggtaaatttccaaaagagttacttgtacataaattatactcatcaaagagacaggatattcctagcattctggaattcccaggactccagaaccatcctaaaatttctacctatatgacctcaatacaggtatgtttgggttcacctggcactgtgtgagttctattcttttccatgaaatggcgactgagagacattatcagcaatgtaaacaaaagtaaaacccagtttgattcttggctattactatagttggcaatgaatgtgtcctgaatgcaggtatcaagtaggatcatatattcagtctgctaaataccagttttctcactgacctgttaaaaattgactgatgactagtatcaggcctataactgtacttttaagttgattaaactatttcagaaatcttcatattaatatacatacactacacttctctattgttatcaataaaaagtgtagtttccacatacaaatttctgattatgtggtgcatttttgaaaaatccaggccttaaaccaaccacctactgttctttcttttgagacggggtcttactctgttgcctagactggagtgcagtggtgtgatcacagctcactgcaggcttgacctcctaggctcaagcagttctcccacctcagcctttcatttagctgggattacaggcacataccaccatgcctggctaatatttttagtttttgaagagatagggtctcactatgttgcccaggctggtcttgaactcctaggctcaagcaatcctcccatctcagcctctcaaagtgctaggattacaggcatgacccaccatgtccggccactgatgttcttaattaattaatatgttcagtcaaagaacatttatttagtgtcttccagggtctggggttatgaagaaggtaaggcaaaaggatcttaaaataggcaaagttagtaattataaaattaatatctactatagttacactagtttttgtatcaaatttacagtatagttcagatttagtttggcagcatttatattttgaacagtttacagtatagtggtgcctattttactgcacatgaagcataattttattatgtctctatcattatggagtttatagttgtttctttgctgttatgactcgggaacacaatgagtaattataaacactattctaatggaaaaaatctgatctggttgaggttacgttttcccggaatgcactatggtgaaagggatggctacttaaaagaacagtaaacttctatattatgcttatctaattagtgaattagaaataagaatgttcaagatcaaggtatatgtctgaatcattctgaatacaacggtcaggtgtcttttctcctgcttttgcaacaaggcagatggaaaataaaacacactaaaatgtttgaaagtgattactgcatacctggtgttctttattaaacttccctaagatgtctgatgataaactgaagataagcacagggttcttcacactgtagtatttatgagctttccacggtagtatttttttgacaggttttggtctctttttaaagaaagaatatattttaaaaaacctaaaatggtattacaaaaggaaaatgttacaatctcacaaagaaacatatttatgtaataagaataaggttttgaagcagttttaattaatatatatatattcccttgtattatggattggtgtggtcttggctcactgcaacctctgcctcccaggttcaagcaattctcctgcctcagcctcctgagtagctgggattacaggcgcccgccaccatgcccggctaatttttttgtatttttagtacagacggggttttaccatgttggccaggctggtctcaaactcctgacctcaagtgatctactcaccttggcctcccaaagtgctgggattacaggtgtgagctactgcacctggccacaggcggctttttctctatgaaagtgaatcacctgttggcagttgattgggaaattcttggatgtgattatcaaacagtgatgttgaagtaagatttgaaggagccatacacagcagtgccttttcaagtttttggcagaaaagatcttgtggctcacctgcctgctctttctttccagtacagagttgaacataaataattaaagtttttggattatgtgtttcttgcctgtcaacaataaaaataacaaaaagacgaccctcttggtagctaattgtaagcactggattgtattttagaagcagagacagtgactgatttagtattatatactaaaatgtattctggttccatactttcatgaattatcagattcttggttaataatacaactagaaaatcctaattcttaaaagtaaatattttgttacacgcatataatgaaaaaaattcagtagtaaatttataattaattcataaggataatttaattcaaatgattacatctgtgtttctggctgaaattattctatgggtaggtaattacatacatattttttgagatggagtctcactgtgtcatccaggctggagtgcagtggtgttagctcagctcactgcagtctcgacctcctgggctcacgcgatcctcctgcctcagcttttcaagtagctgggactacaggcatgtgtcaccatgcccaactaatttttttatttttgcagagacgggattttactatgttgcccaggctggtctagaactcctagactcaagtgatccacctgccttggcctcccaaagtgctgggattacaggcatgatccgggccacagcacccggccagtaattatattcttaaccagtcctgcctcttgggaaaaaaaacttactcagcatgcaaattttccctcttttcttatccattctcaacatttcctattgccttccccatttcattttttctctttaacacatactatctaacctaacacccattttacttcctcagcctgtttgtagcctggcttccccactaactgcatgcttcacaaggcatgcattctggctcctttgtctattgctatatcctcagtgcctagaggagttcctgagaatattaagtgtccaataaatattgatcaaataaattaatgttccggatgcctctgtgcttaattcctctcttcatatccattactcctgaaaaaacttctcattactgctaacccaatctgaaaagctccaaatgaaagctttcccaatgtgataaatacctatctcaaacaaaaaaacagctttaagcttaatggtgaaacattaatttacactgatgtaagaattaagataagaaatgcctactatcactgttgttcattaatattgttctggaggtactaggtctaaatattggaaaagaagaggcaagttattatgtggaaatgaaatgaaatgattatatacttataaaacactatcaagagaattaaattgacaccataggttacaaaatggctataaaattaatcttttttttgagacagggtctcactccactgcccagactggagtgcagtagcgtgatcacagctcactgcagcctcaacctcctgggttcaggtgatcctcccacctcagtctcccgggtagctgggactacaggcacgtgccaccatgcctggccaagtttttgtagagatgggatttcaccatgttgcccaggctagtctcaaactccttggctcaagaaatctgcccactttggcctcccaaagtgctggaattataggtgtgcctggccctaaaaataatctttcctctatgcaaaataaaacgacttagaaaatagatgaaacataccccacttactatatccaaatatttaaaacatctaagtttactacgaataatatgaaggaaactttaaaactactgaaataaaatatttaagtgaaggacacattttgttcttatatcaaaaggacacagattataaagctgtaaattctccctaatttaatctacatgatcaatgtattctcaatgaaatactgagtaattttgtgaaatttgaccaaacgatacaaaattcacatagagaaataaatatgaaagaatacaaagaaatatgaacaaaaatgatgagaagggactactttgatcagatactgagatagaaaactacagtcactaaaatagcctgatactaatgctttgacagaacaatattctggaataaagagttcagaaacagaaacacaaacaaatacatatggtaacctagtctaagataaaggtagagaaagtggacttcagtaaatgatgagaggtaggctagaatctacctggaaatcaaaacaaaagcagattcttattgcatttcttacactaaaatgacggttagatgggttcaaaatgtaaatgtttaaaaaattattaaaagaaaacacagagtgtggaaaaacataaagcctagaaccataaaggaaacaactgataaaaataactgcataaaaatataaaacttccttataattaaaaaaataataaagttcaaaggcatcttacaaactggaaaaaagattttcaatacatatgacaaagacctaatttccttaatttgcagagacctcttaaaataatccattagtaaaatgggcaaaagatatgaatgcattacagcataaacacattacagaaacacagaaaaccaagagttatataaaaagatgttcgaacttactcataatgaaatgcaaattagattccgcttttcatctaccagaatggcaaaaattaaagaatcagataaaacatattattgttattataactgtgatgaatactgataatgcatattataaaaaataaagcatatctgtgtatgtgtagatatgtaaagttctctaagatacgttcattttccaatcaatgtctacatgtaaaatagagttaaattctcatttttaagatttaagactttcatttggtacagtggtaggctgaataatggtcccctaaggatgtccatgtcctaatccctagaacctgtgttactatatatagcaaaagggactttgcagatgtgatcagtttcaggtcttgaggtgggaagattatcttgagttatcccagattatccatgtggacctaatgtaatcacatgggcctgtctaagaaggacacaggaggggtcagagtgagaaggctctgtgatcacagaagcagagtcagagggagaagacacgacgctgctggctttcaagatggaagaaggggtcacatgccacagaatacaggcttttctagaagttagaaaagggaagggaatgatcctcccttggatcctctagaaggaatcagtcctgctgacatcctaactttagccccttaagactcatttcagacttctgacctccagagctgtaagaaaataaatttgtttgaagccactgagtttgtggtaatttgttatagcagcaatacagaactaatacaggtaccttgaaaaacatcacaaattaaaatgagactaaaagcaggctattaaatgcaaatgaattgcactgttataaatttcaagaagtcagagaagatggtgagttcaaacgttttggggaaatatcttaattgttccagaaaccagcttgctttaccttgccttggactatatctaggaacaagatgaccaacctgagatagctggtgggattgtttgctttggaaaaatgagctggagaaaacagccgaccctctcataagcactccatgaagacttttttttaaagcaggtggctttcctgcagaggcagtggcagaagcatggctgaaggctgagaaagcagagtgaagtagttgtaagggggaggagtgacaaagaggcgtcaggtagctggcaaagttaggaaattaattagagctaacaaattaactgaggacataagtaaatatatttagaatcatggggtcaaatttcttactgtctgaaagagggaaggctggaaagaaccctgaaatgttggattagaatgagaaatgctaggttcaaatacacacacatacacacacaaggagttatatacagttacagatctatgtgcatatatatctataaatgtatgtgtatgtgtatatacatatgtatgtatatgtgtgcgtgtatttttcccctaactctgctgagagggcctagaatcaacgacaccccagaaacaatgagtacactgtgtaccattctccactaaataccattctctgctataatgaattggggttccttggagaaatggatgatcctaagcctgaggcaggcaaagagaagaaaggctggtgtgtatcaaaagggcacaggagccagctttaagaagctcccactagtcaaagatagggcaatttgaacatcaataccaataaggaggatacatcagcctgagcaacacagggagatgccatctctataaaaaacaaaacaaaacaaattagctgggtgtggtggtacacacctatggtcccagctacttgggaggctgaggctgcagtgaatttgatcatgccaacactgcactccagcccggacaagagtgagaccctgtctcaaaaaaaaacaaaacaaaatgggatttaccacgtcagagtatctcttcccaaagcactaatcaaatgcaaagggaaaacaggtggctgtggagaaaactggcagatttgtgcttgaacaggtaatcaaggttcatgtcaccagggtgggacaggtgacattcactagtgtccatgggcacttgagaagatcacagcaccacttctgtggtctttctgccacaagcacagcctgtctggttagaaaaaaacatcagccagacccaagttcagggtcttcctattgaatgaaaggcttaaactctaaactctttgacaaaaatgttaaatgaacagaaaagctcttctctaagcttataaatgtggtattatatagctaagataatcaatatcttacggttttcaagaacattatttcaaacactttatctacttttatgtgtcccaattttttgcttcagaaattttgcgagtcactctaaacattgacaaagggaggttatgattcttaacactgattggcctggcgtggtggctcacacctgtaatcccagcactttgggaggctgaggtgggcagatcacttgggcccgggagtttgagagcagcctgggcaacatggtgagaccctgttcctaaaaaaaaattagccgggtgtgacagtcccagccactcaggaggctgagcccaggaagtcaaggccgcagtgatgcagtgagctgtgatcgcacaactacattccagcctgagggatggagtgggaccctgtttcaaaaccaaaaaaaaccaaacgaacaaaacactgattgagaggcagtatactgtggaagaaaaaaggtatgttcccagttctgccaatacaactagctattaggcctcaaatgtctaaggcaagaaattaggtgatttctcagtgacatataaggtccagtctagcactaaaatccataaatgaaatatacctatatatataagcaatttcaagtttatttgataacatgaaaatgtgccacgttcaaagtttggatggttacagactagctatgctatgtaggttttggtaatttaacaactttatatattttagaacaaatgtttgaattcactacccgactgacaccctagtcaccttcaggataagaacccgtgcctctctacttccaccaagtggtggcaagtgcaatgtactgcactgagtaaagggctacaaatctttacacaagtacccgtttttagctaccctgacacaacattctttttaattttcagtgtttgcctgattatttttactagattttcattctattttaatagaattgtattaaaacacacggcgcttagtatctcttacatattagaatgttcatttcattcattctttcagcacccatttgagtgcttactatgtgccaggcactatgtggggtgtggagatacaatgatgaacacaaacagcaaatgtttctatttttgtgggccttatgtcagtaatgaactaatcataatagtgactgtccagagtgtcttcaaggaaggagatacaactctgtgaagataaagaaacctgatcctgacagcgatcagggaagttatccctgtagaagtactgtctgagttgagataggaagggtcagtgggaactaattaggcaagagaggatgagagggaggagggaaaaacaatgcagacagagaggaaagaatgccaaggcctggtgggtggaggaggcccatgtggctgaagcccagtgagaagggccagcggtttcagatgagtcttgagacgcaggcgggggtgaacagctgcagggccttcggaaggcgtgtttatgatgtggatcattaatccaagggcaatgggaagctaactgtaggcaaaagagggaggcgggaggggtggcataatcagctctgccttctgaaggttactctggctgcagggtgaagaatcgagaaaagccagagggaatgtggggagacaagctggtacaggactgcggcaggctgaatgaaggtggtggtttgcacttgggtgtccacgacaatgaagagatgtgaaagatgcccaggagacaacctcacctgggcttaaggattcactgggtgttggggtgtgataagggtcaaggaggaatcctaggtacaacggaagaggttccagctggggttgggaagtggggttgtttggttttgtgcatgttgaattggaggagactgagtggtattaagaaacactgtcacgcagctagctgaacgtacgagtctagctgagaaagggtcaagttggagaaaggtaggagtcaagagcacagggctggaacttaaaagctgtgcgtgtgaatctgtgccttgtgctagatgaaggggcgcaatggagaataaaatgggaacagatgccgagctttgagaatctccaatattaaggagcctgggagaggagggtgagccagaatggcagcaggaaaagcagaagagtcagggatggtcacagaagccaagggaagacagtgtttgtagagtgaaatgggggcagcagtttcagatgccgctgagagattgagcaagacaaagcctgaaaaagtctcattcctggtttttgttttagcagagatgaagagggaagccatactggctgaggagtgagagacaaataatagaggcattgaatatggcagttctttaaagtttgcctgtcgaaagggataagggattggacaataactggaaactgaaggggaacgtggggtcaaagaagattctttttttctcttttgtgatgggagacttgaacatgcttcaaaaccatggcaaagagccagctgagatggaacaggtgatcatacaggagagggaatgtatacctgacagggtagagtttttggcgagtggaaagcgatgggatccaaagcacggagagggagtggccttggttaggaggaggaaggaaggtaggaacagatataagtaaggcttgcagttttgggagctgaagaatgaggggattcccatgtgacagcttcaagcttctctatgaagtgacagcacaagggcgtggtgggagatcaaatctgaggaaaatggtcatttatgaaatgcaatctcctacagaccctcagctaaccgtggcaatcctactctgttactttggttaattggggttttacctgatggcaaaagagaaaagatggggctaggagtttaagagagtggcaagggtagggccgggcgcagtggctcacgcctttaatcccagcactttggaaggccgaggcaggcagattacctgaggtcaggagtttgagaccagcctggccaacatggtgaaaccccatctctactaaaaatacaaaaattagctgggcatggtggcgtacacctgtaatcccagctactcaggccgaggcaggagaattgcttgagcccagagatggaggttgcagtgagccgagatcttgccactgcactccagcctggccgacagagtaaggctctgtcttaaaaaaaaaaaaaacaacaaaaaaagagagattggctaggggccttagctccttgagggcagggacctgtcacattgatcgcggtatcagcacccaggtacttactattcaaaatgatcagcatacggatgatcatttgtctgcatctcagtttgcctcttttggtgcttctctaaaaaataaaaaaggaagagcttaaactcctacatgattcctgtctttgcgctgggaagaaggctctgggttcttttgttcttcaggacagtcccttgtaaagctcttgccatagttctgttccaggggcactgtcatatttatacctaacaaagctaaggggtgtctttacatttttagcttgttagcaggatgcttatatggccttgctgacccggtttaaaagttgcaatttgcaaaatacatactgaaaatactgcacttttacctatggaagttgtaatttatataaggaaattgtaatttatataatcctttaaaaaacttactcatacgaaataacagagaacggggaaataccattaagactgtcatgctcaagtgggggaggggcagactcagggaaaccaattaggaagcaagtaaaataatccacgcaccagatgatgggggcctggaccaaggtggtgacagtggcggttgagagaaatggtagaattgtgaatctattctgggtgcattttgaaggcagtgctgacagactgaaggtgaggaagagaaaaacaggactcaaacaggatgcaagactcgggcaactggaggatggaatttccagcaactatgatggattaagattgtgggaggacaggcttggcttggggaattattgagcgctatcttggacgagctgtgtttgagatgccgtagacatccaagtagggatgtggcaggcagctaaatgcagggatctggtgttcaggggaggggcgagggctgggaatgcacacttggggctcactggaattcagataggctctgagtacaggcgactggatgagttcatctagggattgagtgtagacagaaaaaaggctcaagctcacattcagccgtgaaaactggtctctgaaaaaagttaaccgttggcttaagtgtggcaacgaaacgttaacacgctgaggggagggtgtggataaagagccccgaggctgggtgagtgggggacaaacacagacagagaagacatttcaaaagatttagattcctacgagatagggagatgccagcgctaaggttagaaagaaaaactaatccaaagcaaaacagcaagtaagcagaggcaaaatcggaggtcagatagaagattcagatagaaaaaccccaaagttccctcggtggggcggcggtgagatcggcctccgccccctcgccagacccaggcgcggccccgggagcgctaggtcacctcggcccaggccgtccccctgcccagcgggcctgagagtacgtgtgtcgccggggcgcccggtcactgccgagccggggtagctgttccttggcaaactgtgccgcgaggaggaaacggcggggcgccagcgaggcaggcaggggcgaggactgagtgaccggcgatactggaagcccagaaagagcgtagcaggagggtccggaagggcccagagctggggctgtaacagggtaaccggctgagggggacgacggcagcagcggggccgttacctgctccgcgctgttcccacgactgcgccaacgccgcagcgccggcgcgtccccatggaaacccgcgcgcggggcctcctgggaagcgccggcctgcgggggctgggcgcgcgcatgcgcactcgggcagcaggagccgcggcggggaggggcgtcttgggcctggaggtcagtgtggcctcgcgtttgtcttcggtgacgggaagtgagtttcttgtgtagacgtctgtaaacgatcctcctgccgtccctgttcggcgcccgggaccctgccttcccgcgtggccgcaccgagacgagggagcctgtcacgcgctctggcgctctcctgacctcttaaggctctgtcagtcttaggtaacttgagtcagtaggtgggtgtagacgcctggtcaattcctgggaagcacagttcccctattaaccccttgtcataaagacgattttttttttttttttgtaaaacaaaatctgatgacaaaacaatgcatgtttggcatagagaatttagaaatgtacaggcaagtccaaagcaaaagtcaaaatcacctagatgatggagttatagatgttttttaatgacagcataggaatttggcataatttaggaagacttacattgtttccttttatttatttactttttttcctgcatcaaagccatgttgaatatccttgcagatgaatctttgaggtcacccctgactgtttccttaggataaattcctacaagcgaggttgcagggccaaagcatatgctcactttgaggctttctaaaggtagagggaaactgccttccagtaagtgtcccgatacttggcccgcattggaaattctcttttttcttaaaatttttttgcccattttattgtcaaaaattggcatctttaattgtattcacttcctttttagtaggaagaatagactttttcccatatcttgagtgccatttgtccttattgtgtgatttgcattttcctgtcttttgtccattttaaaacttgacattcatctttgtaaaaatgggttttgtaaggacttttgatgcttgaaaacttggcttgtgatatacgttgcaaatatttcctcaatttgtcagttacctttaattttgtttacagtgtattttggtatttgtgtagagtcaagcttattacatttctctatagtttctgcatttggtttttatataaaaggagaaacgggtgttttttttcaaattgactttaatcctactttggtagaagtgggttaggacaagctttctctccatatcaccatttcttcctctagaaatgcatgacccaccctgagttttggtgggccatgcatttctagaactccttaggtagggaattatccgtataagatgggtgccggttgtttttgctggtggtggtgggcggggcaacatctccaggtaggcaaacattagacaaatgtcactctagacttgacattatggaaagatgggctgatgcttggtgggtggtggtggccccatgacagtaacgagagcggagttttgccattgcgggagcatccaaccctggagctcatgactggaggaattgaaaggtagagtttcctgagaatggtttcctcctcttttctaccagcttttcccagtctgtagacatgataagtcactgcaaatctgcccttgaatctttctttgctttcgcttttgcttttttttttttttttttttgagacgtatcactctatcgctcaggctggaatgcagtggcgccatcccagctcaccacaacctccgcttcctgggttcaggtgattctcctgcatcagcctcctgagtagctgggattacaggtgtgagtcacaacacccggctaattctttttgtatttttagtagagatggggttttgcgatgttggctaggctggccttgaactcctgacctcaagtgatctgcccgcctcggcctcccaaaatgttgggatttcaggcataagccaccgtgcctggcctttgcttttgctttcgaaggggtgttcttttctgtgtacacaatggaaggagaagagccatggcctttcactattctggggccatctccatcatgccacataaaaagcatagcctttatttctctatattaggttcctaggttcctagggatgtcataacagactaccacgaacttaggggcttagaacaatagaactttatcttctcacatttctggaggtcagaagtatgaaaccaagttgtctgaaagtccatgtttcctctgaaggctcttagggagaattttttgagtcttccagcttatggggactcctgctattccttggcttgtggcagcaccactccaatttctgcttccatcttcacagggtgttcttctctgtgtctccctgtcttgtcttcttataaggacaaccagtcattggacttagggcccaccctaaatccaggatgatttaatcacaagaccccctcaactgattacatctgtaaagactctatttccaaataaggttacatgctgaggtttggctgaacatgaattttggtgaacaatattcaacccactacagttattatggtaatcatttccatcattctacataataaagacgtgtctttatttgtcattttaagttatctgtaaagttatgtaaatcaaaacatatcatctggtatcatttatcatgagatcatctgggggtctctatgaagtttgtagcccagtacctcatgtctttaaatcaaaattaatcaaatcaaaaagtgatgttatttgacttgttaaaatatactccaacagacggacaaaatgaactcctgtttcctaaaatgagatgcaccaaaaacagaatgtcctactcgggaggctgaggcaggagatgaatgtgggaggtggaggttgcaatgagctgagatcaagccactgcactccagcctggtgacagaaacaaacaaaaaacaaacaacaaaacaaaacaaaacctccagaatgtcacagccagaaggatgaggggttagttacgtatttttgcattattaactgctattaagtaagcagaaaccagcttcgaaaaagcatagccaacacaacttcagctggaaaatttccaactgaccccgatagactgcctgatgccagccaatggaaacattccctccctcagtatgcgcccccacccccaaacgccttgcagacctactacaactccagttggacaaaggactggtcttataaacattctttattgataaacagctgcagacctccagccaattttggccagcttatagaaattgcacataaaatgtctttgtgccctatagttcacctgttgatataaagagccaaattccatcccattttaatgctagaactccaccccaaggtgaacatggaatgtatgatacatatatgtttacccactgcacacatgcctgaatttcctcataaatattagtagatcctctgcaaccttgctcagtatgtatgtaaggctgactctgtaagacacagataccagctccttcctcccttctgcagcatgtgcatttttggttttttctgtaagctgcattccccaatctgcaggttgtatctccccctaaaaataaaatctcctttccttcctccgtggatctcctggtctttgtgaacagacataaacagcaagcactggagatgttgaatggttggctgcttgcatcttcactaaattatacaccttctttctgaagtggattttgtaagtcaggggttcattgagctttattttaagatgcatttggaatgttcgctattcctgttaattatgttgaagctcgtttgtgtcattagtgtaataatacattagaaggaatctttcagctggagttttcagatttttaatttgtacatttttatggtcatttcgaaaagaataaacttaaaaaaattcatagtgaaaagggggcactaggaatttgagggtagcatctcaggagcttctcatgtggtgtggagaggaatgggtgaggcttaagtcttggatatgccatttcctattcccatcatctctagttctgtgtcctcatggtgagtgggcataataatggaacacagttttagggttcttatacaggttaagggagtggcttatgcaaagcacctagagcagatctggcacatggacaacacctacaaattgttagctgttatttgagtaggaaattaatttctccccagggtttgcagatggaggaggtgtcattattgagggcagttttcacctgatataatcaagagatgcgtattctctagagcacctgagaatccagctatagtttatgctactaacttacaaagtcattagaaaatatgcccccactttcttcaagtaatatttggagaaatatggcatgcttatgtggcagactttaaggtgtgaaaatatataattgtatgaaaaaataatacgtactgtagaaattttgaaaatgcagaaaagaaaaactgatctgtaatccttggtgtgctttaaaataaaatttataattctactgacttaaatttggggaaccattaatcatcttcatcaaggaccttatttttggagcagctaactttgcatgttgaagccaaaagttaaatgttggtagtcacctcaatcattcattgtgatgtaggggcatttaagcgatattccaggaactgggatattccggggactgggatgtcttttctcgttgcaggcacctacctgagggggtgggaaacatgcctctggggctctgggactcaggtgaagagggagtacagaagcctgggagattcctctctgcttcggaacgtcggtgccacccaatccatgatgggcagcaggggattttaaaaagggagccggagaacagagagagagagagacagtaagagactcagttatctaagctaaatatcccccaagtgcttcttgaaaaactagccctttgtccctaatgcccttgatcttgattttgaaatctatcagaagaatttgcataactggcatttgggcttctttgctagattttgtattcctttaatttaatttgtttgtttgtttgatttggttttgttttagagataaggtcttgttctgtcacccaggctggagtgccgtgggtgtgatcatagctcactgcagcctcaaactcctggctaaagggctcaagggatccttccacctcagccttccaagtcgctggaaatacagatacaggcgcctgccaacatgcctggctgtttttttttgtgttattgttgttggtaaagtcgtacctcagtatgttacccagactggtcttgaacttctgggctcacacaatcctcctgccttgacctcccaaggtgttgggattacaggtgtgagacactgccccggaccttctctaacttttaacacaattcaaaatacctatataaatattaacatgtataaacacaaatatatataaataaacacaaaatacctatgtaaacaaagagcctgttataaacagattattttggttttttccccaagcactttaaaatagttaataaacttcaagtcagtgacaagtaaataaaatagtgagacaattggcttgttgcagccatgagtattgagaagccagcggctatttccctacctccctggatgtcagtgaaactttagatggcccatggctggtcagtttctgttctttaggagaaacaggtgggaaagagagcacactggaaacagccactcttaaaggcatttctattgtatgacagtttacttaaaaaattttttttaacctgccaggaaaaaaaacaaagttgctctttacttaaaggcctctgtggctattctgacccttccagtttatttgtttgccaaaagccctttaaacccagcctcctcctagactgaggtggtgttttctgggcttttccagctcccaagagctcctccctcacttctttcgcctcctgctgctctgttaccggggccccacctcccttggccccaaggcatctctgcacaggtctccgattggtgcacagcacagcctggccttttagggactgttgtcgcgcgtttaaagtgatagggaaagggtccagtggctgcttttatcgaccaatcaaatattttcctgacagatcccaaaatattcctgggccaatggagggaggagcccaagatgcctctgctgctccttggagagacagagcctcttaagttggagcgggactgccggagcccagtggacccctgggctgctgccagccccgacctggcacttgcttgcctgtgtcactgtcaggatttgtctagcggcgcattccctgacaggggtgtgttggggggagtcctctttccaactgtcgaaatggttatcaaagtgtttgttgctacatcttctgggtccatagcggtaggtgtctggtggactctttcttcctatactcttttctgaataacttagggttggaaatatggccaacgttggccttcagtttcttttttgcgtgtagtcagctgtggctctgcaataagtatgtgcgccctttgctttctgcatttgatttcatagtgttgaaaaagcatggaaagggtgtaatctggatggctgggtgtgaaaagggattcgagtaaggaggcgtgcttgacactagaatttttaacatgtgatttgtgttgtgttgccttgtgaatatcatagaagcagggacttttttgtatgtgtttctgccattcattctgcaaggcttaaactaatttaaaattgtaaataaatgatactttgtgtaacactgtttggagcggatgatgaaccagattgctaaaatgactctggggtgtaatcacttgtatatgccatgtaatgatgtaaccatactgaaagtgtaaagttagcatgtgtaatccattgtttgaggaaagtgatgtcacagtgaccagagcagacatctctcaggccacagttataaacactccaggcattcagacggccccaaaataagagctgaaagccgaccttcataaccagtgctttgtctaattttcttgagaccatctacctcttcaattctggccttcattctgtgcaagctggacctgccgtaagaaataggggtgatgaagtgacacatttctctttggaaatgggtcagactttgattttaggcttgaacctatatagtgtctgtctgtctggaactgatatttcgaccagcattttagcagcagttaggaaggctgtggagagaaaaaacagttttattaaacccaagagttagagaccagcaaggcggctgttccttttatatctagtttctggaggatctcaggtttcggctgggatttcagcagccactctgccagaaacagtacccagagtaagccattggctggggtgacagccccaaaggcagccgctgagtgccaccactcccagccccgaaagttcatgaggtttccagagagggtgagaagaaagcaagagaaaatagcttggctgtcccttttgctaagtacaactgagcagctattgttttagtgatctctagaacaaattagccgaaaaagatgagaacacactccaaatgtgaaactctgcgaaatcttttgtggctattgatgactgctgaaactttcagttgatctagaaggagtaaattttttggctattggataaaaaaatttttttgggggggaaaatggttttggtgggctctaaatacgttgttgatgctcattgctaaaaactttacctcttaccagccagtcctctatatattctgtagacctggtctacatattcttcagaagacaatcaataagttaatggatttttaaggtttatttgatgtcctgtgttcttgaagtttgggcccataatttagttagctttggatgacctggagaggcaatgttcatcccagggtcttggaaaagccattagttttggttccctaagcaaatgtttcagtgccacttgtaactgtatgaccttgggaaagttatttcaccttgttaagcctcaatttccttgtctgtaaaatgaggataagaatagtgcctacatcatagtgttgtcatgaggactgatgaaatgatgtgcgtgggtgccccgcatggtgtcaagtgtttatcagcactcaagaaatattctaatgattagtgaatgttatttatacttactagctgctattagttaatattagttgctactataattgttattattagttagttaatgaatattaattaggatttcagttacaattattagttactataattattagctaatattatttagtagatcagggtctatgatcagtatgtgtgagaagaattttccagaaccacatacatgagagaatttctgccttagccgtaagaatgagaattgattatccctgcgatgtcagtgctaatgatttttcatgggtagagaaatttcactcaaaacttcttggcaggaaaaccctagagtggcttcttgtgcccatgctactgtgtggcagtcagtctgccaagcctttcctacttatttcttcagcctgtacatttaaaaaatggattcttgcctgatacctcatcagtaagggcattctgacttctgttggttgaatgaaataaatgagaaaggaaaagcaaattgtagtctccttatgaggaattaaatacatgcagctgtgtattacatctcaattttaatagttgacttcaaagagctgtggcacattttaccacgttctggacggatttgggttaagagaccctggggagcaggagagggcgcgtgacttcttctaggaccctcctctcttccagaaggccacagtggggcaggggggacaaagggagagaggacagtccctgccgtctccaagatgcacagcccctggaaccgatctttaaggacagaccctcatagtggctcttgggcttcacagtcctttctccattttgattgacagtgtaaatatcgtgggaaaaatatgactcttgaattagatcgttgagtgtcattcttggaaaattcattcatttattggagcctcagcattgttataaaatagccatccaaatacctacctagatggcccgtgtgacagtgcactgggatggtagtgtgctatgtggtgcctgacagtgcaggttttcagcctaaggtacaaaatgcttttccatgcatcatcttcttcagttcccaccaaaacactgtgaggaaggcattgttacatccagtttgcagatgaagaaattggagatcagagcccttgctcagaaagcagccttccaagctaggatggaaacacaggtcgtctctggctcgaatccagtgtgctttatactacagtacagtgatctcagttggaaagtctcctaactgtacaagacaataaacgagaggtgccaagtgagtggcaataagaggtgctgctgtcagatcactctgacacagtctagtagctaacagtgtctgggtgactttaggacagagaacaatactttcttataagtaaatgtaacaggataggaaaacggagctctctgagtcttcactgaggtcccaaaggctccaaacaatgacacacaccccaaatacccccagatcctgtagagccactactcaggacagacagtgcagcctggggggccagcatgggccatggcaccctggagggtggagaaggggcaaagggggagaggtgaagagtaggagtgtgtccatgatgggaactgatggggtgctatgcacacccctccctctgggccataaagagatggactcttccaagagctgatactgtgtccctgggagtcagctcagcaggcgctgtgaggagctgcactttgcaggcccacaggagctccttgatcagggaccctgcaagggggaggattttggaggagaggggccccatgctagagccggggcacaggggtgcagcaagacgacagtgccggccaggttagctcatgtgctcactcccctcttccctcctctggcctggatcctaagacccttttctgcaggctcccagcccaggcagaactcaagtgccctgaatagcgtgataagcaatgcactgggctctgtttaaatgactagtgtttgggggattacagggggcaaacagatttcatttttcttcttctttttctccttttttggggatgagggctgagaaatggcacttaacacaatgccatgcgtccaacagtcccgcaatggacctggatgcaattgcctgtcttgtgaagcttaatcgcaagcatggtcttcccctcccattgtctccatctctttttgcctttctaatagaagaaacataagtcaagacttttggaaatatttttcatctattccaaaattatggaataaaatatagcttttttcccatcccacatcaagccctgaggcatggttgatagaaataatgttggtgaggtggcttggacctgggccagctgcctcccaggccaattcgtgctcccaagagggtatcttagaaggctttggagaaagagcagacaggggtttggaccgaataaaggagttgccttctgaatagttaattaaaagtaaaactgcctaaaatgaaggcatctctactctttgaaacagcaaagtcgtctctgaaaagatgtaagggaataagtgctttataaaatggcgtgaatagttatggacaggttggaaaagatgtgtagagaatgcgattaattaaaatgatgatttagtccaacaacctgtcatcaggtctgatgggattttgtaatgttgaaaattcagccgtgaaactgtggaatttggagcagtttccatgtggggtagcagtttccgtgtggggtagcagtttccatgcggggtagcagattccatgcggggtagcagatctagtgccaggcatccacggcacagctgtgggaggagggcaccttggtggggagcacgcacctcctcctttggttctcataggcctgatcctggggaattaccagagtccatatgccagaagtttaagagaaattccatcattccacacctttctgtctatctatatttatttgtccgtgcttgccccaaactgcagtacctttgttggcctgagtcttacagattgagtaagtgttgtgttgtggcaaacagagcctttaatttattgatccactgtctttagttccattgtcttttttatattgatggtataagtgttaattaaattaaatgcgtgattaccatttatataagtttatatgtgatttgtatacttatttatataaaattttataatatatattgactgtcaattttgttttaaaaattaacatagtaaatataaaatttaaaaaaattaagaattacttgatattaatttatattatataccatatataatcaaatcaccatcaagaacaaattatatataaatcatataaattatgtatattatgtaagttatattacattatattatataaattatataaaaatcatatatagttaaatataaaaatcttattatattatattgttatatataaaagtcatatataagattattataatatagttacatatataaatcttattatatataagattattatatattatatagttacatctataaatcttatatataagattattatatattatatagttatatataaatcttatatataagattattatatattatatagttatatataaatcttatgtataagattatatattatatagttatatatataaatcttatatatatgattattatatattatatagttatatataaatcttatatataagattattatatattatatagttatataatttggtcttggaggtgatttggttctagggcttaagtatccagatttgtcttacctttccttatattatgaaacacccagccgggcactgtgggtcttgcctgtaatcccagcactttaggaggctgaggcaggtggatcacttgagcccaggattttgagaccagcctgggcagcatggtgaaactccatctctaccaaaaattagccagacgtggtggtgtgcgtccatagtgccagctattcgggaggctgaggtgggagaatcacttgaccctggggagattgagactgcagtgagccaagatcgtgccactgcgctccagcctgggcaacagagggagaccctgtgtcaaaagaaaaaacaagaaacaaaaaaaacaagaaacaaaaaaccccaaacaaagaaacaccctaacaccctatacatgagtcattaaatttgtcaaaagtgaataaaatagatattttggtttacatgtctctaagaaaggagttgagtttagttaaaagagggtttgcatcgagatattagatttgggatagacatgtaccttttacagcatttgtttgaaaccctcaaagtgtagtccttcttgtaaacaaggcacatgaaaatgacaaggggctcttgtgctctgtaaaacatttttgtgagttgtttttatatgagatggtattctattcagaagacttttaaaaaattgagatattagatactgtcatgtcaaagaaaatttttaaagtttatttatttatttattatttttattttttttaaaatttgagacagagtcttgctctgttgcccaggccagagtacagtggtgcaatattggctcactgcaacctctgcctcccggattcaagcgattctcctgcctcagcctcctgagtagcgggattacagatgcgtgccaccacacccagctaatttttgtatttttagtagagacaaggtttcgccatgttggccaggctggtctcaaactcctgacctcaggtgatccacctaccttggcctcccaagatgctgggattataggcatgagccactgtgcctggcctaaatctcactttttttttttttttttgagacagagtcttactctttcacccaggctggagtgcagtggcatgatctgggcttactgcaacctctgcctccggggttcaagtgatcctcccgcctcagcttcccaagtagctgggattacagacatgcgccaccacgcctggctcatttttgtatttttagtagagacgaggttttaccatgttggccaggctggtctcgaactcctggcctcagatgatctgcctgcctcagcttcctacagttctaggattacaggcctgagccaccgtacccggccaagttttaatcttactcttaataaatggccatacttttgcctcagtatcctgagtgtattctatatccatattgtaccaattagttctgtggttttttttttttcacccaaacaagcagtttaagaatctgttcacatgaaggacttggcacaatgtcttgtgcaaagtagagagtcaataaataactgttgattgattatttgttttattaccctttctttctcctccttccctccctctctccctacctaccttccttccttcttccttttttctttttctttctttttttttttgagacggagtctcactctgtcgccaggctggagtgcagtggcacgatatctgctcactgcaacctccgcctcctggattcaagcaattgtcctgtctcagcctcccaagtagcttgcactacaggtgcgtgccaccatgcccagctaatttttgtatttttagtagagacagggtttcaccatgttggccaggatagtctcgatctcttcactttgtgatccgtccaccttggcctcccaaagtgctgggattacaggcatgcaccgccatgcctgggcctttttctttctttctttctttttctttctgacagggtcttgttctattgccaaggcaggagtgcagtgatgtgatcatagctcattgcagcctccacctcccaggctcaagtgatcttcccacctcttgagtagctgggactacaggcatgcaccaccacacctgtctaatttttaaattttttgtagagatgtggtctctacaaaaactttttgtagaggccccatctcgacaaaaatttgtttgcccaggctggctggtcttgacctcctgggctcaagtgattcttccactttcagcctcccaaagtgctgggattataggtgtgagccactgcacctggtctgattacactttttgtaagtttctccctgtggttattaaaatggggtccacacagtctgctgtaacttatttgccagtgtttataaaagatggcatcatacattttcaggagtgaattctttgaagaaagaaaattgtaattgcttttgtaattgtttatggggaaggagttctaagtgtgagagatggccacgttggtaagaaatggctactggcagatacagtcattacgtgttacacaggtagagaaaggacattcaaccatgttcccttaggtgtggctgcactgaactcagagaggagccaggtgtgagtaggaaaggaggaatctgtgggagaaaagggttgttttgttgtgtggcttttttatgtgctgggagaaacatcctccagctttttctagcctctgcttgtgcccttcccctccagtagtctctgtgtgagctttttaatctcctgtaatatttctaaagctacttttagttcaatgtgactaatactcttattttcataactgaatgaaatgcattttagtgtgggtatacttgatatttgaatttcatagtaaagtatcttttttattttattattttgctttattttttaaaaattaaactaaaaaattttttttgagacagagtctcactctgtcgcccaggctggagtgcagggcttactgcaacctccgcctcccaggttcaagtgattctactgcctcagcctcccgagtagcagagatttcaggcgcatgccaccacgcccgggtaatttttgtatgtttagtagagatggggtttcaccatgttggtcaggctggtctcgaactcctgacctcgtgatccacccaccttggcctcccaaagtgttgggattacaggtgtgagccaccgcacccagccttctattcttctttaaacaaaatttttattttatttttaagagacagggtcccgctttgtcacccaagctggagtgcagtggcatgatcagcacactgtaacctcgaactcctgggctcaagcaatccttttgtctcagccttccaaaatgctgggattataggcgtgagccacattgtctggcctcttttttctcttctttcccttttcccaatcccttgtcttcccaattctgacttactttttggccattaaagctttgcaaaaaattaaaagtattttgaagactgcaaaaaagatacgagagcatctctattccaattaggtcatgtgaaaagacaacattacaactcatctagttttgtagattttttttttttttttttttgcgacagttttgctcttgttgcccaggctggagtgcagtggcgcaatcttggctcactgcaacctccacctcctgggttcaagcgattctcctgcttcagtctcccgagtagctgggattacaaggcatgcgccaccacgcctggctaattttgtatttttagtagagatggggtttctccatgttggtcaggctggtcttgaactcctgacctcaggtgatctgtccaccttggcctcctaaagtgctgggactataggtgtgagccactgtgcttggctgtttgtagatcttaattggcttttgtgattccagaatctggcagcagtcagaccaaaaaatggttcacaaagctctgccccaccacacgtgcaggttatatttatcgccagagaaaaggaaataacattcagaaaaaggatgtgaggtacagacagctaggttgggttataactcagtatttgccttatttgaaagtggtttgaacagttggccgcctgtgattggctgaagcttgtctgctgtcaatgactgaaactcagctctggttacaaaggcaaatttctagttaggttttcagtttgtttatgtactaagctaggttgcagttcattacctaggactcctatggagtcttctaaagcccaaatttagttttaacagttgattatacaataattaattaattattttatttatttatatttttttgggatggaatcttgctctgtcacccaggctggattgcagtggcatgatctcggctcactgcaacctccacctcccaggctcaagtgattctcctgcctcagcctctcaagtagctgggattacaggcgtgtgctaccatgcttggctaatttttgtatttttagtagagacaaggtttcaccacgttggtcaagctggtgtcgaacctctgacctcaagcgatccacctgccttggcctcccaaagtgctgggattacaggtgtgagccatcgcacccagcctgattatataataatttaagcattgatgatactaaaatttcagaatttaaatagtcatttggttgaccctttataacaaagaggtgtgattctattattttccttgtttgaatacttaacaaaattatttgtgttgtatagtataactagaggaaggatttaatttttgtaaatgtaagcaaaatatttttcataaacagcctaatatttctctactcttgaccagattaggaagaaacagcaagaagtagtgggttttttggaagcgaataaaatcgactttaaggaattagatattgctggagatgaagacaacaggaggtggatgagagagaatgttcctggagagaaaaaacctcaaaatgggattcctttgcctccccagatcttcaatgaggagcagtactgtggggtgagtatgtgcttctattaaaaatcctgctgtgtgtgtgtttattagaaattttctaaagcagattaagtttgagtcagcatttgaaattattcacaactgtcaggtcatggtctatttctgccatccaatagctggatggtagatccattatgaataatcaatatttaagatttagaaaaggacagaaacaatatcatgatgattcagaagttttggggattatttcaggttctttgttttattttgaagaattgaggtcacatgttcagaaaatacatacatttagctaggaattctgttcagccttgcagtgtgcacacacgtgtatctgcagaggaacatggtaagttttctctgtcacccaggctggagtgtagtggtgcaatcatggctcactgcagcctctttctcttgagctcaagcgatcctctcacttcagcctcttgagtagctgggactgcaggagtgcagtactccacccagctaatttctaaattttttgtagagacagggtctccctatgttgcccaggctgctctggaactcctggcctcaagtgatcctcctgccttggcctcccaaagtgctgggactacaggtgtgagccacggtgcccagcaagttttcacttttataaaattgatttgtagaaataaagtcttactatagatacaagatacatttgtgtaactttaattagtttgaaaactgttctgggcattttggttataacaacaattttgttttatacatttgatagttcatttcaccatgagatcactttttttccccagagtttatagatcatacttaataaatcaagtcgttggaaagaaatatttttaaaaaaggacttcagaatatgagaactgaaaattaacttagaggtcatctaagccatctagggtttttgcagatgaggaaatgagagctgtgtgaagtagagggaatgtctcagcgccatgcgcctgggactgctggagccaggtggaggaatcttatctgacctcttctcttgctgcacagaactgctggttctttaggttacttttttaaaaaattgtttactgccactgtctgttttataaatttataaatgaatgtccacactcattcatttacctattgtctgtggctgatttagcaccatggcagatttgaatagatgcagcagaggccatatgatccacaaagccaagaagatttactatctgcttgttcacagaaaagtttgcggacctctcatttgaaggatgaattgtgtagttgttgggggcttgtattagcttcctagggttgctgtatcaaactaccacacacacggtggctaaaaacaacagaaatttattctttcacagatctggagactggaagttcgaaatcaagatgtgggtgcagggttggttccttctgaaggctctgagggagaattcgttctatgcttctttcctagcttctaaagcttgccaccggttcttagcactccttggcttatggaagtgtctctgatctctgccctcatcctcacatggagtgtgtctctctgtgttcacatggccttctcataaggacagcagtcatgggaatagggcccgccctcatccagtatggccccatcttaactaattacaactacaaagatcctatttccaaataaggtaaccctctttttttttgagatggagtttctctcttgtctcccaggctggagtgcagcagtgcagtatcagctcactgcaacctctacctcctgggttcaagtgattctcctgcctcagcctcttgagtagctgagattacaggcgtgtgccactacgcctggctaatttttatagttttagtagagacaaggtttcaccacattggctgggctggtctcgaactcctgacctcaggtgatccacctgccttggcctcccaaagtgctgggattacaggtgtaagccaccgcgcccggcccaaataaagtcactttctggggttccaggctgacatggatttatgggagacactgttcagtccagcagagggctatacaaacttatgtggttgtgttagcattcttcagaggcttaaccaaaagtcctgtgggtgtggaagtattttcaaacaatcttaatgtggtagcatatattaaggtgaacatgtggtccagttcaaattcctcctcacccctcgctcctgtcctacccacatcttccccaccttcctttacctgacccacatttctcaaaattgtggctcttgttggataaggaaagggataatatttttttaggggggatggtggtgatgaggaattttatttcttataaaatcatttctattatataattgaaaaattaatatatatgcccactgaaaaattaaggtgattcaaaatggtatctagtgaaaattattcccctccatttctatttattatttatttatttaagagagagagtcttgctgtgttgcccaggctggagtgcagtggtgcaatcatgcctgggtaatttttaatttttaaaattttttgtagtgacaaaggggtctcactgtgttgcccaggctggtcttgaacacctggcctcaggcaaactcctggcctcccaaagtattgggattacaggcatgagccactgtgcctggtatcccctccaatttctgacccctgtcattctggctaccttcccctgagccaggctggctctgtgggcctgtgatctgggataccacacaggaccccatccacaggagggctctgtacttgtttaatgttctcctattgctgtcttgaaattctcaaccatttttgaaggaagggcctcatgttttcatcttgcactggctcttttgaattctgtagctcgtcctactctgaggcagccagtgttggcaatttcgtgtttgggtttgcagaaattttctatgtagatttacaactgaatgtcatttaaaaaatcagagtgtatcatatacgactttgttttcttgacttaataactgcatctcagagttcacagtatagctgcccatgcttattttatttgttttaattttatgatagggtctcactgtgtcacccaggttggagtgcagtggcgcaatcatagctcactgcagcctcaaactcctgagctcaagcgatcctcctgtgtcagactcctcagtagctgggactacaggtgtgcaccaccacacctcgctaatgttttttattttttgtagagatagggtctcactgtatttcccaggctggtctcacactcctggcttcaagtgatgcacccatcttgcctcccgtagtgttgggattataggtgtgagctgctgtgcctggctgccccatattttaatgtctgcaaaatgttccattgtgtgtgacaattttttggcttggtcctctaatgaaaaacattcaggttgttttcagcctctcccccttacaaacagtgctgtaggaattatctttatacataacagatctttgtatccggtatgagtgtgtatatatatatgtaggataaattcctggaagacatctgagttaaagtacatacgcgtctcacattttgatcaatattggcaaatgctcctctgttgcagttgtactagtttacatttccaccagctgagtttgagagtggctagttctccgtgactttgacaacactgtgcatagcatacttttgcaactttgacaatctgtttggtaaaacatgaattctcattgcttctacctggatttctttctttatgggtaaattgaacatcttttaaaactacatttataaattatctgtgctttttctatgatttacctatgcatattctttgctgttttccaattgggttataggtaatgtttactggtttgtaagagtctttgcatatgaaagaaagtagccctttgaccatatgtattacttcattctcacgctgctaataaagacgtacccaggactggataatttataaaggaaagaggtttaattgactcacagttcagcatggctggaaaggcctcaggaaacttacaatcatggtggaatgggaaggaagcatgcccttcttcacatgaccacagcagagagaagtgcagagtgaagatggggaaaagccccttataaaaccatcagatctcatgagaactcactcactatcatgagaacagcatgagggaaccactcccataattcagttacctctgactgggtcccttctatgagacagattatgggaactacaattcaagatgaaatttgggtggggacacagccaaaccatatcaccatagatgttgcaaatatttcctccacatttcttacttgtcttttgactttcaaaagggattttttttttgcaatgcagaacttaaattttttttgtgtagccaaatatattaaatcttttctctttgtgattcctgaattcagatttttgttaaggaaagctttctgtgctcagaaattatcagaagaatcatctcatgtttccttctagtacttttccagggaaaataagattttaaatgtcttagtttgcttattttaatcatccttttaaatttaagtgagttacagtagacacaagattaatgtaggtgtccaccaatgttaactcctaggataaaattactacagttattttctgctataaaaaagaagatttcaaagtcatctcttatcccagtttgctgtgatctagtaatttttttttcattttaattgcggaggagaaagaaaaggttttccaaataatgactgctatttttaagatgtattttcctataacaaatatggatctaatgaaataaatatacaaattatttcatgtttaactgtttctattctttttatttctaccttcagagaagtatttgtagtttaccttatgagaagctttgcttaatttgcttttctgtggtctatggacacacttacaaaagtatattcatgaagaagagggctttgtttccagaaagtaggtaaaaatgattatttttatttgtatgctcagattttaaaaggagactcaaaaattctgaaggatatgcaggctcaaaataatgttagtctagatagtcaatgtctctttctacatgattaaaatgtatataactattatttaagtggtctccctggcttctgaagattcttggtcagtcatatgccatgcctgatgatggcagcaggtggaaggagaccccagaggcaagcagtagatttcattgggcagtgaggggattggacatcaagggtagtcctcagtgccttcctgcccctgccagtttgaacttctgctactctatgcagagcaaatgaagatattatcctgagagccagggcagacaactgttagattgagaaaggagacaccacactggaagccaggcacagttgaggccaggctccccgcctgacagaggaatgtgaactggaaagagcagacacatctcttgatgacaagttggcatctgtgcattttagcccaggtaagggccggagtgcctgcctgggaccaagatagcctgggcctgactgaacacaaacaaagaagacctagatcgttcagcacagaggtgcccatttagcagaggtatgagtgtctccgggtactcagggctgtaaggaaacacaggatgcaaacccagttagggtggggagagggcttctcaacatatcgatgttactgaacaaactatgttatgttcctaaaatttattctgaaatatgccgtatgtgataagaaatacataatttaaaaaggagtgatacagtgagcaaccattgtatgcactatccagtttaagaaggacagtatactattaccagaaatgtggaagccctctgtgtgcctctctccctgatcccatcccttcccctctgcaccagtgatagtcattggaaagaaagggtcttgctttgtcacccaggctggagtgcagtggcacgatcatggctcactgcagcctcaacctcctgtactcgatcgatcctcttgcctcagcctcctgaatagctgggactataggtgtgcagcaccacacctagctaaattttgtattttttgtagagatggcatctccctatgctgctgaggctggtcttgaattcctgggctcaagcaatcctcctgccttgaccccccaacgtgctgggattactggtgtgaatcactatgcctagaccttatttttcatttaaaaacctttgtcttcttttacctccctgaatatgcacatagtttactatgacacatgtgttcccattgcaattccttattcccaaacaaatataattttcttttagagagcctcttgttcatctgggaagcttgctaggcttgggttcttctctgtgggaaatgtttcaatttccttaatgaatggactgtttaggctttctactttttcataagttggttttcataattctgtttctataaattctaagatgtctagttttttttttttttttgaatcagggtctttgtctgttgcccaggctggagtgcagtggtgccatcatggcccatggcagccttgagcttgtttttaagttttaaagtctagtataacattttttttcaaaagtaagaggaaggtacagaaatttcccatgtaccccctgttcccacacatgcagagcctcccccattatcaacatccccccaagttttaaataagatattcttaagacctgtttaaaataggtagttatgtcttctctttattcctaatgtttctgttgtgtcttctctgatttttttttttaagtttatgttgttcatagttttttgttcgtttgtttgtttttggtcttttggcttattgattctttctgatctctctatacttatatctttatagctaatttttctcttatttttaaaatttctgcccttgcctgtatcattttttccttctatacacttttttttcctccccttaccttaatgttcagttagatgcttagctcacttttaacctttttttcttctctaatgtcaatatttaaggctagaaatttctcactgagtactgtcagttcattccatatattttgatatgcagtattttcttttttttaaatttaattttatttattattattattttttgagacggagttttgctcttgttgcccaggctggagtgcagtggcccgatctcagctcattgcaacctctgcctcccgagttcaagtgattgattcttctgcctcaggcttcctgagtagctgggattacaggcgccaccacgcccggttaattttttgtatttttagtagagacagggtgtcatcatgttggccaggttggtcttggactcctgacctcaggtgatccaccagccttggcctcccaaagtgcagggattatggacgtgagccgccatgcccagcctgcagtattttctttattgttaagtataaatgttaagatatttatacctttcttttttgacccatgtattgaaattatgagtacatttggagtttcttctactttattatatgcttttaatttttctcagttttgcagtttttttaatcctttcttgatgtaattttactaaagtctcttttttctaattttattttcccctttactcaattcaaataatctatccttttagtggttaacttagctattttaacatacatacttaaattagttaaagataatcagtaaccttacttttgtcccaaactttttttttttttaaagccagagtctggttctgtcacccaggctggagtgcagtcgtgcagtcttggctcactgcagcctccacctcccaggttcaagcaattctcctgcctcagcctcctgagtagctgggattacaggcacgcaccaccatgccctgctaatttttttggtatttttagtagagataggggttcaccatgttggccaggctggtcttgaactcctgaactcagatgatccgcccaccttggcctcccaaagtgctgggatgacagatgtgagccaccacacccagtctgtcccaaacattaaaagggcctttagacactttcaccctaatcactctgtttacatgtgtttggtttttcagtatttcagttggcctctcatcctgcttcacaaattaggcatttctatttgttggttgaacaatcaatgtttgttcagatttagatttacccacatatttactattaattttatctttacttcttgaatctgagatattccatctggaattattttcttcttcctgaatacatcctataagtttctttaagtgaagttctcttggtggtaacttctctaagtttttgtttgtttaaaaaaaggtattttccagacaatgtctttctttcaccttcatgcttgaaaaaatagttttactgagtctggaattctgggctgatgtttattttttctaaacacattgaaattattattttactttcacctggcctctaagttgctattgagaagtcagctgtcagtctcatcactattcttttattgggaaactttgttttttcctttttcttttcctccctttcttcttctgtccattctgtctccttttcttcttcctctttctcttcgtcttcttcttcccctctctctggttgcttttaataatatttctctacgatgtgtctaggtttagagttatttttatttatctactttagaattattgattgggcttcctgagactaagggttgttatctttcaataagtctagaaaattattagtaattggccaggcgagatgttgcacgcctataatcctagcactttgggaggccgaggtgggaggattgcttgagcccaggtgttggagaccagcttgggcagcatagtgagaccttgtctcaaacaattaaattaacaaaaaaaaaatgtttagcaattgtatgcttgagtttaggttttcccctataatctgtatttgcttctccaagagctcctataagacatctgttagctcttctcacactgttttcatacaataatatttcctccacatttttcatcttttttcctctctagattatttgttgtttgtttgtttgtttgtttatttatttattatttttaaaaatagagacagagtcttgctatgttgcccaggctggtcttgaactcctgggctcaaacaatcctcccttctctgactcttaaagtgctgggattataggcatgagccaccacacccagcctggatgatttctttgactgcatcttccaattagctaattttctcttcacgtgtgtttgtttaatccacatattgggttttacaattccgctattatatctttttattttcaggagttctttttggttcctttctaaatttgcttgattgttctctctaggtatttattctgttttcgagtttctcttttatttcactaaatatattaaatatagctgttttatattctttgcctgataattccaatatctgattctgatttttaattccaccttctgttatttcttcatgctctcactatgttttctttttattcccttatttatattgtaacttttggcttcaaactgctcatttttaaaaactttattagtggctatcttagtctgttttgtgctgctaaaacagaataccacagactgggtagtttataaacaatagaagtttatttggctcatagctctggaggtggaaagtccaagatcgaggggcagcatttgatgagggctttctggctgcatcaaacatggctgaaggtatcccaggagcaagagaaagggagagcccaaactcacagcctcaagcctttttataaatgtcatcaatcagttcatgagggtggtccccttatggcctcaacagctccccttaggccccacctcccaacactgttgcattggggattaagtttccaacacaagctttttggcggagacattcaaatcacagcagcggatactgtttgaggcctggggtttatttctgctagtttccttagaactgtatcaaacctagacacatcttaaactcagatttccttttaagattttttaggatcacacatggcatgggaatttgaactgcaacctctcatgaattctacttgtggttataaattctcagaggagaatattttccccttcacccagaagcaaagttgaatcagggaagtttccttccattctgttctgcctggtggggtattttctcattcatatttactttgaaggcagaaccctctgaagttctggtgtgtgtgctttatgaaactccccagcttgacgaggctccgggctttatctacatccccctttttcctcttcagtgtcaaagtgatggtaaaggtgtcatgtgtgtgtcagaaactctcagcatgatcggtggctttggtgtgtgcttattctcaggattcacgctctcactggctggactcttttatgccaggtcagcagtgtatttaaatttttttttttcttaattgggttaaaaattttctttgagacaacttttagggcctctaatctgccatagtagcagaactgggagttgaaaacctgttttatgttcattattttctacatatatttggtagcatcaagtcaaagataatgatgaattgttcttcagccttctgaaattctgaagaaggtatttggtcttaaattgaagcaaaagactagttcactcaactataataaaacctttcttgcctcgaaatctagagttggccaactaaagaagttttcagaactttatatatggaatttctgggaaatagcatagatttactttattacatttcaccaacttactgctactactattaacgtgttatctcatgtaatcttttaacaatgattagtaagtgtgtactctgggaatcaatcagaatttctgataccaaagttcctgcacttactcatgatgttatattcctttcaaccaagatttgaggcagcttccaaccatgtattcagtataaaagaataaaattaatcactgagagacttgaggcaatggataggaaaacaataaagctttgaataagagtaacacacaggaggctgggcatggtggctcacgcctgtaatcccagcactttgggaggctgaggtgggtggatcatctggggtcaggagtttgagaccagcctggccaacatggtgaaaccccgtctctactaaaaatacaaaaattagctgggcatgatggcatgcacctgtaatcccagctactcaggaggctgaggcaggagaatcgcttgaacccaggaggcagaggttgcagtgaaccgagattgcaccactgtactccagcctgggagacacagtgagactctgtctcaaaaaaaaaaacaaaaaacagtaacacacaggaatacataatacttttttctcaacagctgtgacctgtatttggtgttaagattttgtgggtttttttgtgagtcagggtgttgctctgtttcccaggctagagtgtagtggcacaatcacagctcactgcagccttgatctgccaggctcaagtgatcctcccacctcagcctcccaagtagctgggaccacaggtgtgtgccaccgtgcccggctaatttttgtattttttgtagagacagggtctcaccatgttgcccaggctagtcttgaactcatgttcaaggaatcctcccaccttggcctcccgaagtgctgagattagaggcatgagccaccacgcctggctggttttaagctttttgaacatacactaagagtagggtaggcaaagaacaactaagttggtttgtgtgttgccctgtaggacaaacacctgtgactttgtgagcctttttgcaacactgttgaaattgcatcaaggccctgatgatgaagattggcagtaataaagtagtctgggggaatatcgtttatgttttaattataaaaattgaaactcttctaagctattgacagctgcattactgggaaggtggtttagggctggacctgcctggtgaaggactggccctggtaggatctggatggggtggtagcttcattgagcatcagatttcaatccactaccaagtttccaatcactccagttgttcctattttgccaaaacagtcgccctctatgtcccccatggtcttgtgcctgttcgtattgggagggcctgagatgcatctgggcccttagagatactttaatcacagtatggacagcctgtatcatctcagtctcagctgatcagggaccatatgcatagggccagattataagtaaaccagctagtggtgtgaaacttggaaaagccatttactgtgtatatttgggtcttgtcagcaattcctgagcatgggtaggggtgtgtgtgtgtgtgtgctcttgctgtggtatacaagcacaatgaaagtgtataaaaacaaatgtaaagttcatggttagatttcttaactctggaggttagtcatctttgataaagcaaactgggatgactttttgtgtgagctcctaacttaaggactaagaaatacaaaagatcagtttccgtaaataaactggctcacaagtgtgcagtagttttaaactttctttttctttgcttcaaggattttgactctttcttctctgcaaaagaagagaatattatttattccttccttggtttggctcctcctccagactcaaaggtaagtttgaacaaactccattggggttcaaaacaggtaatactaaatgaaggtagaaatcaccgcatccaagactgtttaatacatgatgatctctaaattaacattactttagtacacttcttattctgatgcagtcctatgcatagagagaatgcagtttttactaaaaaaagttccaaaattatgcttttcatatttatgctgtgttttcaccttgttacaataaattttataatacctaagttaggaaatatcattactttgaataatcttaagtgcattcattaaatatgtaaacatttgagctcctaggttgtgtttatacaattattttgttttgaattgacttctcatatagctttatatgagttaatttcataatgatatatacccttacattatttctatttaaatgaaccaaactacattttggtctcataaaaatgggacaggtaagatctcgattcaacgacaaggtaggttttatcagatttttttcttccagtgacgtctcatctttgattatgtataattaaatagagagttatgctaataaagcaggaaccatgaatttgacttgtgtgcatgtttaattcatgtgacttgctaagacttgctgatggattgaatgtggatagggatggattccatgatgacttctaatcagtgtgtgtaaaaatccactctgagagaggaccatattgaggggggaagttaagtttgaatgagacagctgagtgaagaagtgaggtaggcaattgcatactgatctgtgtctctgcaaagtctggttggagacacacacgtggaagctgcgaacgcatgtagatggagctgaagtcatgaaaagtggatgaaacagagtaatgagagagttgacaggatggagaccagagtgggggtggaggtgggacttcaagtttaaagttgcctggaagatgagaaaccagttgaggaggctaagatggagagtagggaaggcaggaggagaccaggagcgtgtggcgtcatggaagcccaggaggagcttggctctttacagaagagggtgatgttagttgtgacaaatgcggctgagagattgagtcaggtgaggccataaaagtgaccactggctttgatgacatggaggtcattagaggccatgacagaagtagtttctgaggagaggtggaagcagatgtatgtggtctagacagagtggtctaaggagggctggtagtgagaacgagggactatgcatagacaattattttgggggaattttcccacagagtgaaagagaaaaatggcagacatcattgttttaaaaaatgccctactccttcccaccactggaaatttgggcagagtcccttgcgtccctgcttgctgccggttccctagcttcctctctcctccctatgttctggaaagttcccccatctctgttctttacccaagctcaatctctcgtcttaacccaagttctctgtctttcagtagacatctcccgtattcctactacttctcaatccccttcttccagaccccagacctgtgggtggtaggaggggagagtctagtttttacaaaggcccactagggggttatctaaacaaaagggaattttctatccttggtcaataataatgtggcaaagctttgaaatgacttttttttaaccttttgtaggtcaaatttttgacagagttactgtcttcaccaagagtcccaataaacagaaggggagacggtagtagaaaaatatattttctgtctgttcatcacaaattccaggaatcatgtcttccttatttcttccctttgcaatatctttttattttttattcctttttttatagcattagaatcttttattttttcatgtggctatagccttcatgatgatcatttaaaacttttgtctgatactctattacactgatgtatcataattgacttccttattcctatatgtttaatttttacttattattgtgtcataaacatgtttatgctattatggtgtcataatgtcatctaaatattttgtataatgttccatcaagttgatgtgccatgcatttaaaaaaatttttgttcatttatttattttttagagacaggatcttgctatgttgcccaggctagttttgaacttctgggctcaagttgtcctcctgcctcagctttccaagtagccaggactacaggtgtgagccactgtgtccagcataatattttttcactatgcttatatttttgaacctggggttgctcattatttttaattacaaataactctgcactgattttcaccatgaaatagtattctttattttggagtatttccttaggataaattcccggtagctctttcagtgagacaaaaatgcacacaactttttatggctttgaacgtgcctccagattactttctgggaggattataacattcatcctgctgcactgtggtggaccagcttcactgtaccttccagatatgagcattttaatgaccttgatcttaggaccattaaattgtattttagaaatttgtttctggttttactgtgctatgaggagggaatttggttttgataaatgtctgtcttaagtgtctttgtaactgaatgtatattttttcatttttgtgtgatattttattttttaagttgacaaataaagtgtatatttaccatgtacaatgtgatgttgtgaaatacgtatacattgtggattggctaaactgagctaattaacatctgcctttcattgaatactttttttttgtggtgagaacacttaaaatctactctcagtgatgttcaaaacacagtgcattgttatttgctatagtcactatcttgtaaaatcaatatcttgaacttatttctcctaacagactattttgctataaaagattgttttctgaatattaaaaaaataacttttttcaaatattacatatatgatattggaaaggtcaaatagtcctacaaagattactttttaaaaaaacagtcctgctaaacatttcatgccagaaaatgccttatattttcctgctttagtctgcagtgtgcttaggtgcagaattccaggctggacgttgctgcacctcagaaccgggaaggtgccgctccatcatctcttcccacttccagagctgctctgagatcacgtctgatgccagtctgtctccagatctttttatctgcctatttttgtctttcccaattctgggagattttagggtccaattttttggttttgaagttgtacgatgaggtagctggtagaggtcttcgttatttgtgctgggcatttgctgggaccctttaatttggaaggtcatgtgccttggctctgaaaaacaaaatgttagaggacttctatgcggattcatttccagttcattttcactttcttttctttttggaattcttcttatttaaatgttggacctcttggatgaattctctaattttcttatcttttctctcccattttccatatttttgtatttttctgctttctgggatattttcttaattttctaccttatcttccctctattggtagtttttttccatttctcctatcaatcatatctgaacttctcaaaagctcttttttgttgttatctctgcatgttcccttattaaatagcttcctattcttattatgtaggttcattatttttcttaattctgagtttattaaatatagttttcttttacatcttcttcaactcattgcattctctgttttctctaattctgtttcttctctgtttgctttgctttcctttttatttttatgtaagttgttttcctcagatgtttggtgatctttgactgtttgtatttaaaacaaagtactgagctggcagtggtgggtgcatgtctgtattcccagcaactaggaaggctgaggtgagaggattgcttgtgcctagggtttcgaggccagtcttggcaacataacgaggctatgtggtggtggtggtggaggtggtaagggtggtggtggtggtggtggtggtggtggtggtgatggtagtgctggtggtgatagtgatggtggtagtggtaatggtcatggtggtgatggtggtggtggagtggtagaggtggtgattgtggtggtgatggtggagatgatggtggtggtgatggtggtggtggtgacagtgatggtggtgatggtggtagtggtggtgaggtgggtgatggtggtggtgatggtagtggtggtgatgttggtgttggtggtggtgatggtagtggaggtgggggtgatggaaagtgggagataaatctggctgccagtgttctagaagcaagtagggaagggaatggagggtctcccctttcagaatgtgaacttcttatatagaccccttgttttcagtatggttgcctacttcagctggcctcatgcccaggaggtcatatttcctctagttcagcttctacagagacaaaaactgcttatttagaaggggacagtcacttgccgtccagggatgaggagggaaactaaatctacttcttctttctctcacatcgctctttgtaagcaattaggtttcagattttttctggttaagtcaattattactcaacgattccctttactgcctttgaatttccgtagacattttttttttcctgcaaaaagacttcttgtccatttaccctgttcttgtgaatttatccttttctttttaacatctttgttgtattgtcagtggggctctggtaagaagccaaagcaaatatctgttttcagcttctcatgattaactagaaactgcctgtagttttcaatggtcccagtcttcctgaaaaggaactatcatcccctgttattccattaatttctttccatatgttggttaatttaatttaatctatttttagttacataatttgagattaaggattttaatatctttgctctttttaaaaaaatagttttattgggatataattcacacaccacacaattcacccatttaaagtgtacaattcaatggcttttagtatatgtagagttgtgcaaccaccaccactgtctacttccaaaatactgtaatcatccttaaaagaaacccagtaccccttagctgtcaccccctaattcagccattcttcctgcctagggaaccactcaaatgctttcgttctctgcaggcttgcctcatctgagcatttaatgccagtggaaccatacaccatggggtcctttgtgactggcttctttcacttggcatcatgttgtcaaggcttgtctgtgttgtagcaggtgtcagcacttctttctttgttagggcagactactatccatggcacgaatggatggactgcattttacacatccattcctcagtggctgggtatttgggttgtttccacgttttggctatcatgaatactgctgcgatgaccatttgtgtatcttttgtttaatcgatttccaatacttctacagttgctgctttgtatcagaatctcttggacaattttaaaaaattcagatgcctgagttttactctagacttactgaccctaaattaccaggggagaggcccagggatctacatttgcaaaaagtcccttagttgattctgatgctcatttctgtttaacaaccactacactggagactcatttaactaatattcatgtatatgcttctccagaatgaatgtggtatcttatttgctttagttaagaaactcaaataggcagggaaattgtaaggccactttgttcctttccccattcctgattctctcctgcattcatcaatttggtatctctctttccacaagcaagacatctttttgtgctgtattttcaatgcctaattgttatattgtatgaaatctgctttttaaaaagacaccatggacattttattaatatttttaaacaacaatagtagtagcagtcgcaacaagaacaaactcttagccaggcattgtggttcgtgcctgtaatcctagcacttaggaaggtagaggcaggaggatagtttgagcccaggcatttgtgacctgcctgggcaacatagtgagaccctgttctcaaaaacaaacaaaaacaaacaaactcctagagggctagcaacttaacagatattgcgaagctccaaatgaaattccagccattaaaaaaagtaactcatataatagcattaatagatgtcaaagaaaatatatggataagtgaataatgaggctgacaagttcaagtagattgctccaggtcacaaggctcataatctgtagacctagaatttgatttcaacattttctgattattaacccagtatcctcttcactcccttgtgtttagggctacatttatagaaaacctatctacgcttaagtctattaaaattaaaaaactcatttgtcacatatatagataactatcaccccaatattttactctaaaattaataattaaaagagaagatccaaacattttttttctgccttttaaactagaatctataattcatacctggttgttgagagtaaactttttgttgtaggtcaaatatcgaataaatgatagaattagaaaaataacccgtttgccaaagccaatgtaataattgattacagcatagctaatgaatagataataaaactgggtaaaaggcattaggtgaatttgtttcttgggggaatcagttaaatttcctgtgctaaagtattagccccgccaaacattatttgctaaattcaaaggggaaaccgatctttataataaagagatctattggtcacagccttaacaaagtagccaaaccactgtcactactaatgggactcactgatatcaaatgctgcctgttgcaaacgtgaagtccatagtctcaccagtcaagtgttcttgctaaatcatttcacctgcatccaatccagtctccagctccaagttctagtctataaaaaacacagaggaagaggagcaagttaaataatatcacaaagaaagaatcagacaaaacaaaaatttggaacattcttcaagataactgacccagattcttaaaacattcagtgtcatgaaagaaataaataaaaagagatggaattgttctagactaaaatagactgaggaaatatgagaatcagatgcaattaatatgttttaagaggttcaagtctaaagaaagtaactgtaaaatatttattgcaggcaacttggggaatttggaaaggaattggatattagatgacattagggagttcttgttagttttcttagatgtgataaaaatactggagttacgtaagagaatgcccttgtttttagaagatgatactagaatatttaagggtgcagtttgataagacagatgaaaatgttagcaagtgttcaatctatgtagttcatctttaaaagcttttctttgtctttaaaattttcataatgaagagctggagcaatgcttttttttttgagacagagtctcgctctgtcacccaggctggaatgcggttgcgcagtctcagctcactgcgacctctgcctcctgggttcaagcaattcttgtgcctcagcctccagagtagctggggttacccgtgcccgccaccacgcccagctaatttttgtatttttagtagagacgaggtttcaccatgttggccaggctggtctcgaactcctgaccttaggtaatcttcccaccttggcctcccaaagtgctggattacaggcatgagccactgcgcctggcctggagcaataaggatttggagctaagcatatggcaatgttgtattgcctttgctcttattagttaaaagcccttaaaatgtcctagtcaaaacttgaggaggattgctctaaatggagaagaacacaactcaaataaaacttgtttcaaggcagaaagacacacaaatggcaaatggccgtgtccaaagttactatgtctaaagctgctttaagttttacagggaaaaaaacagactttagaaaattatgtggaaaagttagagcagatgaacttattttccagtgtgcagagtgtccaggatcaatctcatattttcagcaacaaaaataaaataaaataaatggttggaagttgatcaacatagatattgccatttttctttctctgagataatgacttgccattcatgtctagggacatcccacttcctagaccccttctcttgcatttctcctgagaagtctcagagttcacctctcttctcatcgaggcttttgtagtcctggtatttctttccatccataatctgtctcattcagcatgaaatgaagaggaactccagtggaaaagaacatatgattcagttagaaaaccttacatactttttacctgctgaccctgaatttgggggcaagatttttaacgttttcccagctataaaatgaagagagaaatatgaccacctacctcttaggggtatttgttttataatttattctttcaagagaatttatttgcgtacatgctgggccagacactgggctggttgattgaagggactttatggtctagaggaatagttagatgtgagcattctgtaagtagataaaataactgtctatgtgaatatggagatggtccaccaatctcaggccttatattaagtctccgaaaagagttgatacctcacttggtattggaagatttagtaggagctcagtaagtggaaaaagatagtcaagacactatgggaagatggatttatacactaaggcaatgaaatttatgagagtatgtttcattcagtgaagtcatactttggatggaatcagaggtttcagtagaacccaggatatggaagtgggtaaagataagagctgaggcaagaaaagttagtagggatgatattgtaaagggccttctgtgtctggacttttttcttggcaatgagaatgatgggaaaaggtcagtgtggagtgatttacatttcacaaagcctctgactcagacagcaacacagaagattgttagagataagatgcagaatctgggactatatctttcatatttacatcctcagagccaaatacagctcataactcgtagtaggtgttcacctctgaaattcgaggcaataattaactggggtaccaaagtcaatgaaacactccggagatattcagcaccattcttcaaattgaatgtaaatgggacaggtttgtttattgtaacttgctattttaaaaaaaattatattttgagatctatttatactaatacgtataaatctatttcagcctctgctgtgttttatcttatctcatttttattttaatatctaatctccgtttttagatcctaccctgatttgtgctcaggtactgtcatattatataaaactcttgttttgtggaagaaagggatggccacaggattatgaaacctggcctagagatacctaagaggccgtccagtccagattcttctcttctgagagaagcaacatgaagcccaaggagcttaagtgacttgtacaaagaaccccgctaattagcagtacagttcgtgctagagcctttggtgctgtcagcattgcttaggttgataggtgtttatactgtgcgcagggacagagtacttccagtatcctttgaaaagacgacatctgatttatggaaacattacttatcacggtgtcatgttgtagtaaacaagattgtggaaaggtgtcagcaaggaaaattaatctcactcaagctaaaaataggtactcttgacaattatgtagaaaatgcatgctcataaaacgtatcatcatatgcagcatcattgcttttagaacatttttcttgtcttagacaggctgttctaggccaaggaccagaccagttttcccaagagggctttgtaagtaagcattggttccataaagtcaaccttagttctttaaaagcatgtggtcatatctgattaaatgaacatcattcttaataggacatggcaggcaggacctaggttacataaccaatgttttcaattatgccctggcaagaaggaagacagattcttgttgaagttatgcaaataagtatattgccaaaaaatatatatgtattctgattgaataagcagattcaataagaatttttgaactccagaggaatcgggcagggagaataagaggtcatttacaagtgattcatttcagcttacaaaagcagaatctacaacattattatgatgtatggaaagcttaagagaaagcaaaaagggcttccttatatataaggaaaataagacattaaaataacatcaacagtattccagacaaaaattactatcatccctcaccaattcatttaatcctatgtaattaattcctattccactggatcttgtggatcttgggttagtcgtctaatgaacccatctgcttctcaacaaaagttctggaaaatttgactaagtccacggatatggtctcaaagttgttttctttttttttttttttttttgagacggagtctcgctctgtcgcccaggctggagtgcagtggtgcgatctcggctcactgcaagctccacctccagggttcacgccattctcctgcctcagcctcctgcgtagctgggactacaggcgcccgccaccacgcccggctaattttttgtgttttttagtagagacggggtttcactgtgttagccaggatggtctcgatctcctgacctcgtgatccgcccgcctcggcctcccaaagtgctgggattacaggcgtgagccaccacgcccggccggtctcaaagttctttaagcaatgccatcagaaacctgaacccaaatgtatttaacatataaccctttactgtggggctctgagcagtcattcttcatgaaagatgaagcatttttgcttgtagctcattacaaataacttcagggaagcatcaaagcaaaacatgctaacaaaaatatctgtagatgacaaaaaacttaaaatgggtgccatttattcattgcttataattttcaaaagtgaaagtctagaaagtcataacaagaataatatatttgatgagaaaatttgttgttttctgtgacatgcaaaacgaaactataaaatcaaccccccaaattttagacaaattacttataaacataatcattaggcctatttcaaagaatacagaaaacattatatctaatttacaacaataagtgggcatagcaaaaatcttgatgtaattattcagagacataatatactctgactataccaagcatatgataagaatatcaagaaacaagatgtagtaggtctggagtaggtcctaaacatctatttattaataaaactgtatgagtatatgatgggaattcccaatcgaaaaacactgttgtaaaacatgctagattcagattaaagaaggatcaagttaacatttaaaacaactgaagttatggttgataacttaagcacctgttgtctgataccaggcaaaacaacaatataatcaatgtctttttatttttattttttattttttgagatggagtctctgtcacccaggctggagtgcagtagcacaatcttggctcactgcaacttccgcctcccaagttcaagcactttcctgcgtcagcctcccaagtagctgggattacaggtgtgtgccaccacgtccagctaatttttgtattttcttagtagagacggggtttcagcatgttggccaggctgatcttgaactcctgacctcagataatctgcctgccttggctttccaaagtgctaggattacagatgtgagccaccacatccagcaatcaatgtcttttagtacattaatttagtcaggggaatattattatatcaatgaaagacatccagttatttaggcaattagatttgcccttaattgacagagatatacacagccataacaatgtttttttgtttctgttttttgaggcaggttcttgctctgtctcccaggctggagtgcagtggcctgatcacggctcactgcagcctcgaccttctgggctcaagcgatcctcccaccacagcttccctagtaactgggaccgcagatatgcaccaccatgcctggctaatttttgtattttttgtaaagacagaatttcaccatgttgcccacactggacttgaactcctgggctcaagtgatcctcccaccccagcctcccaaagtgctgggattatatacaggtgtgagccatcatgcctagctgtcatagcagtgttaaagtgttacctttacagattgctgttggtgtgtaactcctcagtgccaaagcttatacatcccagcgagggctgtccttctcatgggaaccacattaggaagttctaacattccaacagccagacaaacattgctcaaaagaggtttcaaatccctctattagagtcatagtaacatcttctattggaagatggattttcttgtagaacacatttcagtctaatgaataaggcagggataatatatctggatcatgtaacttttggccaaaagtgacttgtgatgaaaagttttgagattcattttccggtatcactagcgagtgcctattgaaagcatttttgagtaatggcaaaatatttaagtaagtgtggcatttcctggtgacctgaaggaggaaggccaaactggacagaggacaggcgacttcacttgaaggagtacaaaaggaagaagcagaaggagctttggaggaacatttgttgagaagcataaaagatatgaatttggagcacaaaattcattcaaaagatgttctggaattttctaatttgaaactacaagatgggtccttactgcaggaaagggtatgatatctcaccaattcatttagtcctgtgtaatgaatcctcattccactggatcttgggctagtagtctcaggaagccatctgcttctcaactaaagttctggaaattttgactaagcccactggtatggcctcagttctttaagcaataccatcagaaacctgtactccaaagtttctagcatataatcctttatgacaggcttctgagcagtcattcttcacggaaggtgatgcattctggcctgtagctgagcagagctgagcagtccgacatgtaacttcattgagaaccagaccgcagagttcaaggaggccttccagctgtttgactgaatgggtgatggcaaggcccttacagccagtatggggacatgacgagggccttgggccagagccccaccaatgccgaggtgctccaggtcctgggggaacctcaggagtgatgagatgaatgtgaaggtgctggactttgagcacttcctgcccatgctgcagactgtggccaggaacaaggactagggtgcctagttttaggattatgtccgagtccaaggattatatggaaggtctttgggtgtttgacaaggaagagaagggcaccatcatgggcgctgaaatccggcaagtccttgtcatactgggtgggaagatgacagaggcagaagtagagatgctggcggccgggcatgaggacagcaatggttgtcaactctgaagagctcgtctgtgtggtgctgagtagctgggcacattcccagcatccccccagccctgtcctttgccctgtgagacactgtgtatctagccccgaaggctttctggtcacagcacccttcccatcttgtctcttttggataatgcttgccatgagcattcaccaataaacttgttctctgttccccccaacccaaaaccctcaaacaaacaaacaaaaactacaagatgagcaacagagagaatgaacagtgttcaggcctccattcaagaagaccagagggaagaaggcatcaaacataaaataaaacacaaagaaatagaaattgtgagtgaaaggtacaagtttgcaagtcagatgctagagacctgatatgtgcacgagaggagttccagaaacaacaaaagaccagatggaagagggctaatcattcgagagatgccagggtcttccagttggagatgctgctgcagccccctccatccccttatcttatgactgcaggaaaaccagaaagggtgctgcctgaggactagaaactatgggagaatccctgaaaggttagaaagcaaaaacatttggtttgaagaaggaaatcaaggtccaaatgcctgtcagagatgggagtggctctgtgggccctgcacagcctcagtggtgtgttccagttgcaggaagggcctgggcatgggcttggagcttgaaaggcagagcccacttccatcctgctcttagacctggcaggggtcaacacagtggtcaacagagtgatcaacagggcagggcagtgagcactgagttgggtggggaggcacagcaggtctgagggaggtattcttactccagagggacagagagaagtttagatactggcagtcagcctcaaccctggctgcacattagaaatctctggggagctgttaaagctattaggttggtgcaagagtaattgcggtttttgccattaaaaatagtatgccagggctacatttgagagcaattaagcagaagcttcagtcagggagctcccaggtgaacctaatgttttatcaatgtggagagccacttctgtaaaggaaaacattgaataatagtgaaatcaagaattgtaaactatcttggaaagatctaggagttctggtatcactagtgagttcatcactgtggatggaactatgtgagaaaggagatataggaaaatatccattacaaggattctgttcatggatgagggtatggagaaaagaagggaaataagtgtaagtgttcgaaagggcgcatctcaattgcaggtgaactatcttgatgggaacccatgtattgtgtaactgtgaatgttaatagagaattatgtttaatgatgactattatgaataggaaactaaacagtagtgagatagagaagcatttcagaacatttatgttaacaaggccgggaggcagagctgaggaaaacagagtgaagagaaactttagccagcaatagtaaggaaagggaaaaagcataagagagaagacaggctgtcatgaattaatacagcagaagcatttgaactaactatatcagttgttctaataaatttgaaaaggctaaaattccctggaagaaaagagacgatccgtttggatttttgcacagctgttctgcagttgagaatatctccgaccatgattgtgcattttctgttcctccctttaatcctgtcaatttattcttcttgtattttaaaaatttatattattaggcacatttgtatttataattgttacagcttctgtaattatcagctgtcttttacaatttctggtaacgccctttgtctttatatctgtattatataaagctactctagatttcttatgcttatggtttgcctgggatagtttttccatcgatttcctttcaacttcctatgtctttgtttttataatatgttttttggagacagcatctgattgggttttgtgcatttttttttttttttttgagacagtctcacactgtctggagtgcggtggcatgatcatagctcactgcagccttgacttccctcccaggctaaaatgatgcccctgcctcagccacctgagtagctgggactacaggcatgcaccaccatcctcagctgatttttaaattttttatagagagagggtcctactagttgcccaggctggtctcaaactcctaggctgtagtgatcctccctctttggcctcccagagtgctgggattacaggcatgagccactgcacccggctggtcttgagcattttaattcatcttgataatctgttataaatcagagtatttagttcattaacaattaatcattgacataattgtgtttaggtttactatttctttattttttctattggcctccattttatttatttatttatttattttattttttatttttatttttagagacggagtgatctcggctcactgcaacctccgcctcccaagtacaagcgattctcctgcctcagtctcccaaatagctgggactacaggcgggtgccaccacactgggctgtttttgtatttttagtagagacgggggtttcaccacgttggccagactggtcttgaactcctgacctcaagtaatccacccgccttggcctcccaaagtgttgttgggattacaggcatgagccaccacgcccagccccatttcaatttttattatttaaaaatacaatttccattttatttttctccagagaatagtttttcttcagtcttctaaggcctcagctacttacatgggctttggtgggggtcgtggggcagcacccgcaggtctaagtaggggtggaggtgttcggtccttgcaagcttcacgagattgattcctcactactttgctttaatattataaactgcacaactcacacagtaatgtaacttcatatccagcttgggaagcacataggtgtcgaagaagcttgcttagaaatgtccctgactgctgtggcctccactttgtttcaaatgacaaatttcttaatggccttgttcttgggcacacatcaggtatagttcgtgcagcaaataggctacacgtggccatggccctttttggtatgacctttgttccttcttttatttgtcatcttggaggcacagactggagctggtctcccatttttattcctctgttgtatgcttttttgctttcttttgggctttatgaatgtgttttagacttcctttttaacttatctattgtatttttaactatgcctcttggcattatttggtagtggttgttctagtggctataatatgtatgtattttttaagttttttatttccataggtttttgggggacaggtggtatttggttacacaagttctttagcggtgatttgtgagattttggtgcacccatcacccaagcagtgtacactgcaccctatttgtcgtcttttatccttcacccccttcccaccctttccccctgagtccccaaagtccattgtgtcattcttatgtctttgcgtcctcatagtttagctcccacttttgagtgagaacatacgatgtttggttttccatttctgagttacttcacttagaataatagtctccaattccatccaagttgctgcgaatgccattaattcattcctttttatggctgagtagtttcccttggtgtgtgtgtgtgtgtgtgtgtgtatatatatatatatacacacacacacacacaccacattttctttatccacttgttgattgatgggcttttgggttggttccatattttggcaattgcgcattgtgctgccataaatgtgtgtgcaagtatcttttttgtataatgacttcttttcctctgggtagatacccagtagtgggatttctggatcaaatggtagttctacttttagttctttaagaaatatccatactgttttccatagtggctgtactagtttgcatttccaccagcagtgtagaagtgttccctgttcactgcatccacgccaacacctatattttttgattttttgattatggccattcttgcaggagtaaggtggtatcacattgtagttttggtttgcatttccctgatcattagtgatgttgagcatttttgcatatgtttcttggccatttgtatatcttcttttgagaattgtctattcatgtccttagcccactttttgatgggacgttttttcttgataatttatttgagttcattgtagattctggatattagtcctttgtcaggtacatagattgttaatattttctcccattctgtgggttgtctgtttactatgctgactgttccttttgccgtgcaaaagctctttagtttaattcagtcccagctatttatctttgtttttattgcatttgcttttgggttcttggtcatgaaatccttgcctaagtcaatgtctacaagggtttttctgatgttatcttctagaatttttatagtttcaggtcttagatttaagtccatgatccatcttgagttgatatttgtataaggtgagagatgaggatccagtcattctcctacatgtggcttgccaattatcccagcaccatttgttgaatagggtgtcctttccccactttatgtttttgtttgctttgtcaaagatcgttggctgtaagtatttggtattatttctgggttctctattctgtttcattggtctatgtgcctatttttataccagtaccatgctgttttggtgactatggccttatactatagtttgaaatcaggtaacatgatgcctccagatttgttctttttgtttagtcttgctttggctatgtgggctcttttatggttccatatgaactttaggattgttttttctagttctgtgaggaatgatggtggtattttgatgggaattgcattgaatttgtagattgcatttggccgtgtggtcattttcataatattgattctacccattcatgagcatgggatgtatttccatttgtttgtgtcgtctatgatttctttcagcagttttgtaattttccttgtagaggtctttcacctccttggttaggtatattcctaagtattttatttttttgcagctattgtaaaagtagttgagatcttgatttgattctcacttggtcactgttggtgtataggagagctactgatttgtgtacattaatttcatatctggaaactttgctgaattcttttattagttctaagagctttttggaggagtctttggggttttctaggtgtataatatatattcttaacatctcacagtctacttagacttaatgttataacactttcatgtaatatgtagaaacattgccatcatatgcatccattgactgtttcccatcctttatgctatacgatcatgtgtatcacatttccatataccattaactctactatgtaatattcccattgaacagtcttcttcctcttcttcttcttcttcttctttttttttttaagtaggaggtaatcttttgtgcttacccagacttttaaatttctgatgccttatgaagagtgaagtttccatctggtgtcattttctttcagcccaaagaacttcctttagtcctttagcattgtttcatagtgaaggtctgctggcaataagttctttacttttcttttatctgaagtgtctttactttgctttcattcttgagggatatttcaccggatataagattcttagttgacaggtttttttcctttcaacaccttggatgtgtttttttcccttctgtcttctgatctccatagtttctgatgagacatgatcttgtttcctgtagatagtgtatgatttttctctgggtgcttttaagattttcattttatctttggtctgcagccatttgattatgatatgcctacctatgtttttttttgtgtacttattattattggggttttctgagagtcttgaatctatatcatttaccaaatttagaaaattttcaaccattatattttcaaatattatttctgctccatttgttttcatttccccttctggcactctaattacatatatgttaaatcttttgttattattccacatttccctaaggcttaaaattttttcagtcttgtttttctttgatcttcatattggataatttctattgatttattttaagttcacttatttttgtatttgtcattttcattctgcatccagtctagtaatttttttatttcatatattgtatttttcaattctgaaatgttacacttgtttgatttttttaatttctatttttctattgagaatcagttgtttcgttcattgcaagcatgtttgcctttacatctttgagaatagtttaatagctgctttaaaatccttgtctgcaaattccagcatccaggtcttttctgtgttggtcttcattggttgtttttttctcttgagaatgagtaacattttcctggttccttgtatgttaagtattttggatggtatcttgaacatagtgagtcttgtgttgtggagattctgtattttgttacattcttctgaaaaacattgactattgtgtttgtttcagcaggcatttactttgttggacccaaacagcaaactctatgtttctagtagcagctatcctattacttaggatactttcagttgtaccaagatcaatctcagttatgaatcagagggtaaaagtctctttttttttttttttgagtaaagatcttgctctgtcacccaggtgggagtgcagtggcataatcatggcccactgcagcttcagactcctgggctcaagcagtcctcttgtcttagcctcccaagtaactggtactatgggcatacatcaccatgccttgctaataaaaaaatttttttttgtagaggaaggatcttgctatgttgcccaggctagtcttgaacccttggcctcaagtgatcctcccatctaggcctccagagtgttgggattacagatgtaagccatcatgctccttctgaaaagtctaaataaaatattagcgaaatatattcagaagtgaattaaagataattcaccatcatcaaacaatttattcagttgccataattcattacatgaactgattaatggagaaaaaccatatgattgcacctataaatgccaagaagatattcgatataatttatcagatatttctagttaagaatggattaaaatataagtagaaagaaacaaaacataaaatacatttatcagaaggtaattataagtatcataatgaaccatgcaatactgaagcatttctattaaaattagaagcaagataggcatgcctgtcatcaccatattattaaacattgttttaggagccgtagttattgtaataatgtaataatgtgtaataagtcttatgtatataagacatggataaaatttaaaattatctttatttggccgggcgcggtggctcacgcctgtaatcccagcactttgggaggccgaggcgggtggatcatgaggtcaggagatcgagaccatcctggctaacaaggtgaaaccccgtctctactaaaaatacaaaaaattagccgggtgcggtggcgggcacctgtagtcccagctactcgggaggctgaggcaggagaatggcgtgaacccaggaagcggagcttgcagtgagccgagattgcgccaccgcagtccgcagtccggcctgggcgacagagcgagactccgtctcaaaaaaaaaaaaaaaaaaaaaaattatctttatttgcatatgatataattgcatgcctaaaaatctttaaaattccagtgaaatgcattagaattgataagatggtttcttaagtttctagatgaaagaaaaatatacaaaaatttgtaggttttgtttacatcaataattataagtagtaagttaaaatgtaagaaggaaaagtatcccattcatggtagtgataaaaatctgtaaaatgtttaggaataaatttatcaagaaacatacagggcctctgtgaagaacatagtttaattttattctgaaggacactaacaaatactgaagaaataaacctgcagtgttcctggatggaatgatttaacaataaggaatgaaaattttctaaattaataaatgtttagtgctatttcaatcaaaattctattttttaatttttggaactaagaaacattatcttaaaatgtatttggaataataattgtctgagaggagccaagaaaattttgaaaaatactttgtgtaacaacttgactttccaaatattaaaatatgtcctctaagctacagtgataaaagcagtatattggtcttggaactaatacatgtatttatatgtatatctgagaatatatttatatttatatgtttatataaaatattttaatttttattttcattgtatcagtatttatatataggatagtgtagaaacatcaatttatatatattatagtaaatgacaaatatataatctgaatgtaatgggaaatgatgatttatatataatatagacataatttgccatctgtctggaagaaaacaaatgtagacgtcgactttacattatatgctaaattaaattccagatggattaaagctctagatattaataacaatataaagtaatagaagcatattttagagaataaaagttagataaatttgcccataaaaagactaaaaactaaaaaaaatacaacaaaatctgtaaaaactgtagactggaggaaaacatttgtaacatgacaaaggactaaaatttttaatatagaaagatactctaaaaatttatagtaaagcacaaacaactcaagtaaaaatgagcaatgcattcactgcaatgtctacaaaaaagaaaaaaatcaaataaaatgggcaaaacatatcaagacaattatttgaagaggaaatagaaatagctaaaaatttataaaaaatatgcccttatttccaataatgataaatgtataagtgaaaccaaaaatgaaattctattttcttctcaacatattggtaaacattagaaataacaatcatcttcactggttatgaggataaaggagaaggagacattcatatatcgctgtggggatatgaattgctgccacctttttgaaaactaataagaatagcctcaccattttattcagtttagtacagtgttatttgtggtggaagaaacatataaacatttggaacacccattgactgggaaatgtttgaataaattatcgtatatttaatatgaagcagatgttaaaaagaatgattcaataggatcaatcatatgaattgacctggacaaatgtccatggtacattgagctaaaaatgaagttgtgcatactgtgttcccatttctgtttcaaaaccacaaaaataaaagaaaaatgacaatcaattcccccttaaaatagcttttatgtattaggatgcagaggtaccgtatcacatttttaatactgattatcacaggagggtgggattggagggtgtgtgtgtgtggcttaatttgctcccatgagcttgcagagcctctgtaataaaaataacctgatattttaaaaggctgggacccattttgtaagttaaaagagcatcagggaggaggtgtagacctagtccttcccctaactcacaatgtgacattttctgcctttattttcctgtctctgaagtgtgggtggtaatgactgccctacctacttagtgaagattaaggatgaagagaaatatagtttgaatagttaagacattgaaatgcaagctattatccttaagaaaattctcaaacactctcactttacataatgcgggtgacaaaatcacccaaggaagcatcgtcccttcccaatggtgatgtagtgggagaggcactgagcaccacagaggtaaacactggtgtctcgagccatcgtccccatgcccgtttcctcaaaatgtctacttggtcctaatctctctctctctctatccatccacctgtccatctatcatctatctattatctattcatctgtctaatcaatcatctatcatctgtatctatccatctgtattagtctattttcatactgcaataaagaactgcccaagactgggtaatttataaaggaaagaggtttaattgactcacagttcagcatggctggggaagcctcaggaaacttagtcatggtggaaggtgaaggggaagcaaggcaccttcttcacaaggcagcaggaaggagaagtgctgaacgaagagggaagaaccccttataaaaccattagatctcgtgagaactcactcaccatcatgaggacagcatggaggaaaccaccccatgattcagttacctccatctggtctctctcttgacatgtggggattattgacattatggggattataattcaagatgagatttgagtggggacacaaagcctaaccatattatcatccatccatccacctatctatcatctgtctatctgtctatctatctatgtctgtctgcctgcctacccatctgtttgcccatccatccattcctccgtctgtctgtctgtctctgaacattatccatccatccatctatccatccatccatctctccatccatccatgcatccatccatttatccatctatgtatgtttacctgtctactttatctttctaccttatctatcttcttaatttttaatctctaaaattataagcctccctccatacaagcaatagaaaacactgtgtaaagatagaattcttctcctcatcagcctgaagtgggtgaactgaaactcctcacttaggcagtttgttaccctgcaatgcacataggttggatctttgacttatcccagtcggcattttggagtttggagatcctatgctctagtcgctaagtgacctaatgagtgggcagtctatgtttgcttcatttatatactgtgtgtctaaataagaaagccacagcatatgtggcctgtttttttttttcttttttctgtttttgagctcatatcctgggtttcctttatgaccagggatcagagaaggctgaagaaggtggagaaactgaggcacaaaaagagggcagtgaagatgtgggcaacctccctgaagcccaggagaagaatgtgagttttcgctttttcacagcagtttgactggattctctgctgttcgagacttttacagggcttgtacaacttgactctgggcacaagcagtcagaaagagggcaaggagctgagagtttagccagggaggaagcaagtaatttctactgatgtgttaagcactggaatcctggtgcagagagggctaaagggaagacaaaggagcctgaacccagaccaggagggagccggctggacaaggcttggagaatttgttgtggtggtgttatggctaggttaggtgtatgctctttataaacaagggacctttctgcttgatcatgattaatgacagactcctagcttacacccacccaggagccctgcccagtggggaaatagagctaagggagtgcagtatatctggcggaagacaagaggaacttgaggataaaaaggactccttggggagggaaattgacactcagttaatttaagttcaatcagggaaatagcagatcttggtgaagtcacatgattaattctaaaggggttcccatgcagtagcagcagggtaaggagtgggcaatgttgggggacactgtggttctgtgagtgccaagctgacataataggggatgggatgggccacttcttcaaggagttctgaaaatgtgctgggaaaccaggcgccaaggaaggagcctggtggggctgggaatggggtgcaggcattgttctgggcctccttagaggagaatgttagagggcttctccactgggtcagttgtagcaaagactatttttcaaaccctgatggtttgctaatttatttattctgggagaggtgtgggagcttttatgagagctggatcctcattcaccagatagaatgtggctagaaaggggctgagacccacacccacgctatggaaaaaggggtgtggggctgggcatccatttgtctttacctcaaagaacttaaattgggaggggctagggaaggaaattccctgatatttagacttatatttgaagtagactgctatttcaaaatgttgatattacaactctgaagtttttgttttaaagaaagacaaaatcttcaatcttgacctagaagttagacggtgtttcatggcagcctgtataattcagaaacaatactttaaaaattaaatatagtgaccatttcattatcttgtaattaaaacataatctgtttcacaatttgaactttgcatgagttgcctaatgcacccttacagtcatattgatgaatactttgaagttgagtttgcttcttttaagacatagagacaaagatgaaaagcattacaccccagcccctttctcccgtgagaccagcaggaaggtagcatatttataatcagatcctgcctcctatagccagggtgggctttgcttcagcttctcagccactgggctgggttagttctgtgaagtgatgaatcacccagcttggacgttctctttgctactacattttaaaattgtgagcctttgacaaagtcaattataatcttgtgaatcctggtaggaattaaaaaaaccattttttgttatttttgtgtgggctatggtgaagaaatgaccgtaagtgaaaaatatttttattttatatgaatatattactaacatcatattatcaaatttacttttcaactctttaatgccatttatcctacagaaagacagattctgacttcttcctgtttgaaaaccaacacatgctctttgatttactttaattcaattaaattagaaaaaccctctgtgattgtcagtaaacagatgaaaaatgttgtaaaaacatgattaacccttatgagtgtatatgaaaataggctgaattttaaaatttaagaaggagacaaacaccacttagatatttagaatgcttgcattttgtgcttcaagaacctactggcttgttttgacggtctctggtttgttgttaaaagctgagatggggccgggcgcatggctcacgcctataatccctgtactttggaaggcagaggtgggcagatcacttgaggtcaagagtttgagatcagtctggccaacatggtaaaaccccgtctctactaaaaatacaaaaattagctggctgtgatggcgcacgcctgtaatcccagctatttgggaagctgaggtgggaggatcgcttgaacccgggaggcagagtttgcagtgagctgagatcgtgccactgcactccagtctgggcaatagagtaagaccatctcaaaaaaaaattgctgaaatgggaggacattgtgggctatttgtaaaggcatctctcctcccagggcaccccaggcatagacaggctgacagggaatcagaaagacaagggagagctctgtgtgttttgaacattgattttgaaagtatgagacacatcctagtagtttcatgtaggtatgacacctcagataaatccaaggctttcaaactcctggctccgttgaaaccatcttgaggctatttctttttgctcctcttggcttgctgtggttaaaacagaggtgctcccctgggcttccctcattaaccaacacgctgcggtggatataaagtttagaatattcgtgggcccacatttggttcctaagactcctgggcaaggaatgtcagcttcctttattgctttaaattccctctatctgctccatgtgcccacctcatggctggcaggagcttccagctgggtggggtgttttgaagaccctgtcctcctgagggtctcacagccatcctggggtcgttagtggtgactgggcagggattgggtgctggttgtctgtggtggtgtttctgctgtctgtcccttggcatgggccagaccctctgttctggctggacacagactggcctttcacagtggctggccttctgaccgcggacgctgctgcctgtacagagtgccttgtgttacttaaatgccccagcggtccctggctctgtttctgtgtatgagcagggcctgggcagtacccctcctggaaaatccttctttcctccccagtctggccacctccgtcttgccaattccaagctctttttttttttttcctcagggaccgcctagctttatcaccccattagcctaaggttttgaaaaccaaggtctatactttcttccttaggggtggaaagccagaacaaataggtcgcctgtgggaagagaaaataactcttactctgacccctctaccccctcagctttgtgtagcagaaagaacaagtcacaattcatatcctggccttcagccacacttattatgagaaggaataaaaacagttttaaacattttattctgaaataactatagactcacaggaagtttcaaaaataagagtcttgtgtgcccttcacccaacttccccaaatggtgacatctcatctagccttaatgaaaccagaaatgcaatgcattggtgcatttctgttaactagatgacaaaccatatcaagtttttaccttttttttaaaaaaacctgccttcatttgtgtgttaaaaacaattgtcatgtgtgcagtaaaaacacaaaacgagcaaaaaacctctctccagcacctggcaatgttcagttgagtgataaaccaggtaaatgcctaagtcagggacaggcttatctgatctctgctatgaaacatgcatactcaatgcacacttgtaggcactcatacaattccatttaatggagaggaatatttacctaatgtttgacattgattaaaaaaatcaacagaaatggaaacaaaaactattatcttctttaatgatatggacttcccctgaccacctcctcaacttccagggttcttaaagacaagatgccaagatgtaaattctgtccttgataaaggattgaggcaggaggacttgggaggtcaggagggtgaacaccgaaaagaccatgacttcatgcctaggaagatcttacctgtaactttagaaaataggggacctcatggggcctggcctgataacccaggggagggtgaggggctaaggaaccggcgcctcaggagtaaaggaggaaaacagaaagtcagctcagcttctgggcattctctaagaaatgaactgcagactgggacatcatgagagctttagaaaatgctggaaacattgcaccttgtgcaggtttggtttgtgttttttgatcaaggtacaattatttaaaattgtatgctttgtgaacccagtcatcctatctgaaagtcatgaggcccttgcttgacagataacatgattatggtctgtaaccacccctctctggcttcctccaatagcagtcttgagaaaagtttcaaggggcaaacattgatgtaggtttgtgggaggagtcatgggtctcagcctgggtccctggagtgcctgcagctcgagaggactctgcctctgtcctctcatctctagccgctctgaggctggctgcccttgcaggtcacgctgggctagtccttcactatctcccacacctgccacctgttcccagtgaacgctgcctggcactcaccaccacggacacctgtccttagttctggccacgcaccacctctgcagtctgcttttctggccaagtttccaacaaaaatagctgctgtggaaggttctaagacttcccacttctgaggtttctctcttctggctttctctgaaaaacaaggtgaaattactttaaggtgtatgcttcctcaaatggtgattatgtgagatcttggcttaattgactggatgattataattatcttaaaaaaatgcttttgtgcctataattacttgccagccgtgaaagtcaattcaagcattttacatagataacttttaaggatctgcctaattccagtattttataattctatgaaccaaggttggaagcttaattattattatttttatttatttatttttagagacagagtctcattctgtcacccaggctggagtgcattggcataatcatagtgggctcgagtgattcttccacgtcagcctcccgagtagctgggactataggcacaggccaccacacccagctaatttttacattttttgtagagatggggtcttgctctgttgaccaggctggcctcaaactcctggcctcaagtgatcctccctcctcagcctcctaaagtgttgggtttacaggcatgtgccaccacgcccagccattatttttaaaactaatatatcccacctcattctatgggggatttgaagctgagctggagtagcattacacaaatgcagtcattcaacattttatgggcagattgagtgctgccacttgccaggcaggactccagggactgtggagggagcagtgaaaatgacagagtcactgcccccacagagcttatgttctggggaagcttgtggtggtaatacccaaagttcttccaagcttacttatcctttcgaggctaagtatttttatgcattctctgagcaatcacttcccctgagcaatcactttccctgctaaacatatcttttaagaaattaaggtcaattcagatattgataaagagtgctaggagccagatgcggtgtctcacacctgtattcccagcacttcgggaggctgaagcgggtgaatcacctgaaggtcaggagtttgaaaccagcgtggccaacatggtgaaaccccatctctactaaaaatacaaaaaattagctgggtgtggtagcgggtgcctgtaatcccagctccttgggagcctgaggcaggagaatagcttgaacccaggaggcagaggttgcagtgagctgagattgcgccattgcactccagtctgggcaacgagagcaaaacttcgtctcaaaaaaaaagagtgctaggttcctccatagttgttgctagctaactataaaagttgagacttacattcctataagacttcctactgccccccaggctagctctacggttgacagtatctggttaattcatttgtttcaactgaatataactaataaaaataattggattcagaagaatgtaaaactctacataaccaataattctatggtacatataatgaattttattctgatcctatgtgaagaagaagaaaatcaaagttctttgagatccaaagagttactaacagatttcatgtgttcttctatccaatcactaacacctatttatcgagcttgcctgttggttccagaaagtggcctggaggggccagacagttcccagagatccaaaaatgaataagacacaggttatgcccccaaacacacagactagtgagggagacagataagtaaatgatgattatgggagcaagtgagaaggtccttaactcaaccttatgggttaggaaagtctccttggaaatgttttgagcatatcctggaaggtgtggccaatgtgagaaaattgcatgtgactcagaatggctgaagtagagtggtgagggatgaggccagaggggtacacagagccagatggccttttcactgttctaaggaggtgtattagtctgttctcacgctgctaataaagaaatacccaagactgggtaatttataaaggaaagaggtttaatggactcaccgttccacatggcgggggaggcctcacaatcatggcagaaggcgaaggaggagcaaagccatgtcttacatggtggcaaacaagagggcttgtgcaggggaactcccatttacaaaaccatgagatcttgtgagacttactaccacaagaacagtatgggggaacccgcccccctgattcagttacctccacctggccccacccttgacacgtggtgatgattgcaagtcaaggtgagatttgggtgggtacacagccaaaccatatcaggaggatagagtatcttgaggagatggaagtttctaaagatgagggtagtacagtaaggttgggtgctttttggaacgatctctctggctgcagtctggagcacagattggagatgagaaagaaaagaggaggtgataatcactctttaggagcttccttcagcaacccagtgagcaaagatggtggtcatggcagaggaggggcgagacatgggcaggattaggcaggattaaagaggcacgatcaacacgtcgctgtgaaagcaacccctggattttgcaacaagtgccagactcttctcctgcacattatttgagcaccaaaacttggggtgtcaccagtggcatttaacgtaaaggttagtttgaagattcccagtgctgaaaaagtcctcttggcctgattcagacctggctggcactgtcaggctttcaagttcagtgcccgtctcagaaataggaaggtattgttctggaaatggctaaaaacatgaagttgggccaggagatgtgggagtgtgttggatgctgtataacttgccttctgtgatatttatttatttatttattttagatggagttttgctcttgttgctcaggctggagtgcagtggcgcaatcttgactcaccgcaacctccgcctcctgggttcaagcgattctcctgcctcagcctcccaagtagctgggattacaggcatgcgccaccatgcccagctaattttatatttttaatagagacggggtttttccatgttggtcaggctggtctcaaactcctgatctcaggtgatctgcccgccttggcctcccaaagtgctgggattacaggcatgagccactgtgcctggcctaccttctgtgatttttaaaattttactttatagacaaggtcttattttgtcacccacgctggagtgcagtggcatgatcatagctcacagcagcctcaaactcctgggctcaagtgatcctcccgcctctgcctctggatgcctggctaatttttaacatgtttcatagagatgggggcgtcttgctatgttgcccaggctggtcttgaactcctggcctcaagtgatccttccatctcagccttccaaagagctgggattacaggcatgagctgttgtactctgccaccttctgtgattttgatttttccattattaatcttgagaggctgcctggtagtgtaacaaagacacttaattaggaatcagtagacttgcagtgagtcctgattgtgttgactccttgtcctgtgacctttgactttggcaaatgacttccctctgtggcctcagtgtcctcatctgtataaacatggtgctgggtagagaatgtatatgactgcaagatcacattcagtgccccccgtccatgattccctgagctcactgcctgaattgtaaggcattaggaatttttagggactgctctcaagaaccacatctctctctttaatgaaagcaattgtggcactctggcttcagggaggtttatcggaccattctgggaagggatggaaaagcttttgttttcttcttagaggcatttttaggagctgtaacctggttattttgctttgatctgggggaaatagaaattccagtgggctggtggcttgcacagtagagacctatttgagccttgggtgaccccacccactcttaccttgcaaatttctttctttacccagaaatcagtatttaaaatactttgtgattcagaaatgttatcattttgttctcatagaggaaaagtttttgacctacttttattaacttgttcaaacctgaagtaaagacatagttataagggcataaagtcagaaaagacatttttgttcaaatttttacattgcttgcatatggtctgaatttcgctagatagcactatcaatctttggtatgctttagaaatagaattgaatgtattactaagcagtattaataattacattttctcaggagttcaagtgatgggaaacggtctttaatctcacagttattttaagagcttgaaatataatgtatgaaagaagtagggatcacccagctatcatatctttgctatttacttattttatggataaactaatgtgttgttcattttgattagcttgtattttattatagtttgcttgattttcagatttgactttaaacgtacttgaattatgtttttttctttaattttgatttatggatgtaaggaagaagaaggagagacagccacagaagaggtacggtcgaccatctttaacagctgtgcttaatctgcttaataaaaacatcttttaggtgggaggattgcagcttgaggcacgttcttaataacataagagagcgatgcaacccacacacccagaaaatcctcctttaacatgctgagaaggaaagtaagttggagataagtttgtccgagggaggtggagagagaaacggggcttggctgtggactctgttcggagccccctcaggtgaaggtgtcttccgtggtttctcactgacatcaggccaggccaggccagggcactggctggagatgcctgctcctcgtccttttccaccctgttgaatgcactgggtttaggcatcctgcatggtggttagtggtgttttcattgagggagggattccacctatgtttatgtttttgaacatctttgaattaatcacttttattgtttttttttttttttttttttgagacagggtctcactctcttgcccaggctggagtgcagtggtgtgatctcagctcactgcaacctccgcttcctgggttcaagcgattctcctgcctcagccttctgagtagctggaattacaggcacgtgtcaccacacctggctaatttttgtatttttagtagagatgggatttcaccatgttggccaggctggtcttgaactcctgaccccaagtgatccacccacctcggcctcccaaagtgctgggattacaggtgtgagccactgcactgggcctggattaatcactttaaaatgctagagaactaacttaaaattatgaacacaagggtagggagaataatttactaagttacgtgtattgtctagatgtttcagcacaaggtcatcaacattaaaaagggtcccaaatgtcaaaagaaatccccccaaagaaacttttgttaacttttttttttttttgagacggagtcccgctgtttagcccaggccggattgcagtggcgcaatctcggctcactgcaagctccgcctcccaggttcacgccattctcctgcctcagcctcccgagtagctgggactacaggcgcccgccaccgcgcccggctaattttttgtatttttagtagagacggggtttcaccgtgttagccaagatggtctcgatctcctgaccttgtgatccgcccgcctcggcctcccaaagtgctgggattacaggcgtgagccaccgcgcccagcctttgttaacttttgaaatgacaaaattcatgatctttatagaaaatttaaaaaatgcagatagaagaggaaaatgaacatagcttttaaccctcgttacccagagataaccactgtagctacatacacacacacacacacacacacacactgtagctacacacacacacacacacacacactgtagctacacacacacacacacacacacacactgtagctacacacacacacacacaccccatcaatttctggtgaatactcttgtagtctccttttttttcatggaatgtgtctatatttggggaggtagtcagtacagatctgcttcatcattttaaatgttaatatatcaaaccaacccctcttcttagacctatagattatttctagtatattctacaccatgatttctcaatatttacgtctttccaataattatttcttttgtttctctcttgctaggccagcttcaaaatagaattttaaaaataagataaaaacatattgttaatttggaagaaattccagattatatatataggttgctgataacttttgcttcaagaaattagcttgttacaagaaaatgtaaccaacttgtgcatttaacagctcatcctgacaaaattcaatttgctgattctttttgtatttgattcttctaactatatatatatatatatatatatatatatatatatatactttctgaatttgtaaaggttatttgctgagaatggtttgttaatatgagtggagactgtacacttaggtgggattataaaacctgttaggattaacatatcattctaaagcaccattctaaattgaggactctgtgtttagaaggatgattttttttatgtgtgtgtatgtatgtgtggtatgtgtggtgtgttgtatgtgtggtgtatgtgtatttgtgtgtggtgtatatggtgtgtggtgtgtttggtgtgtgtgtgtgtgatgtgtgttatggtgtgtatgttatggtgtggagggtatgtatgtgtatgtgtgatgtgtatgtgtatattgtgtgtgtatttgtggtatatgtgatgtggtgtgtggggtgtgtggtctggtgtgtgtgtgtgctatgtggtgtttggtatttgtgtgtggtgtgtatgtggtgtgtgtgcgtggatgtgtgtctgggtggtgtgtgggggggtgtgtgtgctgtgtgtcatgtgtgtttccgtggtgtgtgtgtgtttgggcggtatgtgtgtggggtgtgtgtgtggcatgtgtttgtgtggcatgtgtggtgtgtgtatttgtgtgttgtgtgtgtttgtttgtgtgttgtgtggtggggtgtgggaggctttgacctctagtccagcattttacagtctttttctcactgtatccttggcccttatgcttcttaatactaatgtaagttttgttaaaataagacggaagaaatagccatggagggtgcggaaggggaagccgaggaggaggaagaaactgcagaaggagaagagcctggagaagacgaagattcctaggccttttcatgcttcatttcttccacttctccaggtagctacaggattctggggtggaaaagctgctagttaccgtactgtatgctatctgcggcacattttgcttagtaacaggagaaagggaattccaattcagggctgtctgtctccttccaaagccctggtctgcacacctttctggcggggtccagctcctttctagagctgcggggctgctgacctttcgtgggtctgtttcttgcacactagggcacagaaggctatggttgatgggatttctaggaaaaagtgcacctttgatgcagggaagagttttgttttgcatttacttcctcctcttcctctatataaactttgtttgagagaagatacagcaagtgtccttttatcagcattctgtaacctcaactcctccaccaaccacatgtacaactttaggggggtgactactgatgttcagaatgatggcaataaattataaccttaaaaaatcacaaagctggtgttgagtcatgaaagaaaattattgctgccacgggtttagtcgtcagtgcttggtactccatttccgtttctattaaccagaacgctcctctggaaacaccggggaacatggtgaagtccctttaggtatctttgacaagtaagctcttgctgccttctggttttaaacttcccttgatgatggaaaataattatgtaattcttactagtttgataagtgccacatattagtgaacatttattaagtgttaataagacaatagaatctgataatggatcttgaggacatgggcgaatgcttaaatattgtgagccatacagataggacagcatgcgtgaaaacccctaaagacatgaagtgcattagccgggtggggtggctcatgcctgcggtcccagctacttgggaggctgaagcctgaaaatcacttgaacccgggaggcagaggttgcagtgagccaagattgcaccactgcactccagcctgggtgacagagcaagactctgtctccaaaacaaaaacaaaaacaaaaaacaaaacaaaacaaaacagaagacattaagtgctataaaaatatctgttttttcctgatatttggcaaatacctaggtacatgttgtattattattaatatgattggctttgcaactgaatttgaggccatagtttattctctagggcaacattgctcatggttttgctctggagctataagcgttttttaaaaaatttaaaaaagtttagtctttttatctcccatattatgcctccactgaaaattaagacggctttttgggctgttactctcaggagataatgatggaatatgcactcattattctctaaatgagagacacttatcaaaccagtaagaattacataattattttccatcgtcagtagaagtttaaaattacaaggcagcaaaagctgacttgtcaaagatacctaaagtgacttcaccatgttccccaggcaggtctctagttaagaattggtgcatgtacaaagaagggtggatagaagggtttatttggagaaggaagaagaaatctttggtgctctttaaaaattggctgacaaatagcaatgctctttgcaccaaagtccaatttgaatagtagggatgtcccttcttaatagacttacaaaaaaaagctgatataaaaagcacttaatctatttttagagcatcttggagctagtgagggtggccatcacactttgttattggaccataaaggttttgtcattcatttgcttgaatgagaaagtgattctagcccacgatttgatgtctctccagggtgtttctttcatgctctggacccacagacttctactttaaagccctctgcttgccacttggttacaattccatttctaaggagtgggttgggactcatttttgaaaaaaaggaaactggcaagcttaagatattctacctgaagaatggtagaaaatgaaaatatgattatatttatcctcataccagaaacaaaacaaagcaaaacccacagtaacagactcattggtcctgtttaaatccatgtctgttcactcagcttggaaagttctttaaaaattgtgcagttttaatgtgataattataaagaaatattggatgtgaaatggcacagccgagagagaatctttaatgtagacagatggcttctttataggccatttccaaaaaagaaagaaaaaaaggcaagttacagttgtggctagcacattctgcctgtttctctgatgggttctagtttggaatccagtccctaatagtctgttgtgaggtcaaaatgtctgacagtgaaggagtaaaccaggcagcaccctaaatcccagccactgactcccgaagagagtcaataacctttaaaatgcgacatgatgatgcagtcaggtattctgcaaactatttggcttccaaaaacaaacccatctcataactcatagattatccatgcattttatttgaaaagacgattttagacagaacaaggcaatgaatggaactatgaaagaattctcatttcccatagttgaagttggagtcagaatctattattattattatttatttatttattttattttttgagacagggtctcactctgtcacccaggctggagtgcagtggtgaggtcatggctcactttgacctccctggtctcaggtgatcctcccacctcagcttcttgagtcgctgggattacaggcacgcactactatgcctggctaattttcgtattttttgtagagatggggtttcaccatgttgcctaggctggtctcgaactcttaggctcaagtgctctgcccaccttggcctcccaaagtgttggaattacaggcatgaaccaccacgtctgacctagaatctaaattgatgtttgagtcccagggcaaataatgtccaatatgagactggattctacctccccaaagcttgccacttaataccttcttctggtgtagccatgaaccatttagagctccgcctctgggaccaagctgtcaattcagcctattttccatgaaaacacagtgggaaattataattggagatgttgtcttccttatggtgtttgatatgtgtttatgcagagaaaggatataaatctagcttagttttccatgagacaaattccctttcctttcagtggggagcaaatgatgactagtggtttatagaataaaaggcaacactttcctttattgtatgttaagtgatgaagattgtggtaaacattctgtgtctttctctacagtctttccctaatatttgccttttcttttagaaaatggaagctatgaagcaacatttcaaatgtctctccacaaaccaaactcaacagaatactttggcttgaagccggcacacccagggttactgaggacttatgctgcctgacctggttagatgtacatggaggtatctcccgaatcatacaaaattaaatgtgaagaccgtttatgcataccttcatgtgcctgacagtcttggcttttgaagatttttttttcttttttgctctgcatagctagaccatcttattaataatactctgaaaaaaatgatttcaaggcatggaagttctctgtgatacaacaatagtatttcttcaaatgcgccttatgctacttatctcagaaacaggttttaaaatgaagtgctttccagagaaccatcatataaataaagattaatagaaaaatatcttgtcccaaggagcatcatttcattatttatagtctctgcttgcatatgcctgaactccgtctgtctgttgccaagtctaaatcttcagcagcacttttctgtctgcgttgggatcgatgtcttttattgcactgattatttggtccatgttttcaattgcattgattgtctcattacgtcgtatttttttttttattacacacacgttgtgcgtatcatctttgaagccttatctaactgtaactttatcatccacttgtgtggggatgatggtaaggagggatgatggtaaggacagaaatctgcaacccagtgcccttcacacgtttctgagctgaagggagtggctgcttctgtttctcctgctgttgattgatttgtagccatggctgtggagacgggtcctgtaatttttcttcctgatggccaggagtgtgtgttcacctacagctgatccagctccaatgacttgtacaccaggtaagtttgatagcatttctctgctcacctgcctgcctcagtttactgtagatattttttcttccttgtaagattttgatattccccctgctacctccctgcctatgtgtgattccttgtgtttttgcagcaaatgttgctcctgtattgtcagaggggctcatctccttgctgtgctcttttcctatttcatgttaattatggcaattcaacttggagtggcataaactttcccctctggagtctgcctcctaattttgcagcagagtctgttggtgttatttcagagtgtattctgcagttgcagaagtctcgtggctgtcatgaactctgggaaacggctcttttcttgttaccctagtaacaaaaaaaggcattttgaatagaattaggttattttgtttccaatcattgaagtagtctgtgttaaaaacatttctccctttgcttaaggtaaaagaccacagtaaaatggaaattcatataattgaaaattaatttctacttttaatttcattgcactaaattatgtcctatctaaaaagcttgcataatttttacaacaaccccctacacaaataggccttaactttcttcttcttgctcagggctgacttttctctctttcatggcagagtaggatggagatagatttagttaggtgccaattttcctcctatttctctctctctctctctcttttttttttttgaaacagagtcttgctctatcgcccaggctggagttcagtggcaggatctcagctcactgcaacctccgcctcccaggttcaagcaattctcctgcctcagcctcctgagtagctgtgattacaggcacgtgccactacgcccagctaatttttgtatttttagtagagacagggtttcaccatattggccaggctggtctggaactcctgtcctcaagagatctgcccaccttgctatttctcatattttaaaaagaaaataaatatctatgctgacaataagcaaagataaaaacccagaccacttatttaaattgaattaattttttcttatattgttttcctgtagtcagaaacattaacatcttagaagggtatttgtatttgctcctgtttcattttatttaaagtatcactgaaatgcaaaaatcacttagatcaatagtaccctatggatggtatcagttctcttctagttttggcttcagctgtcccttcagccttccatggttagcaatccagtggcacagtgaggagaatcccagatatggactgtatggtatcaaaatacgattaaaaaatctgaatgcttttcaatataggaagcttctagaaactaagcagcattgtgaatctgtaaaaaagaataactcacaaggaaaccccaagtgaataaggaaaatcattttgaagaaaaaccaaaagagaccagagaaatggaataattgcatgatgatctgaagtgaatcgaagttcaaagagcttggtttaatagtataaaggaggcctgaacacgcaaaggaactgtttcttttctttccttttttttttttttaattagaaaagcaactacacaaaaatttgagtgtattttttttccagccactgaacaatacactctcctttccccactctcctctcctgggctccctctcgtttctttggactgaaatcttcctttgtggttgtctttgagttcttagttttctcaatgaaatgtgaaaggtataggaagagaatgaactgtattgcctgcaaagattctttggaaatatttacagattttttttctttttttttttttggagacagtgtctcgctctgtcgccagggtggagcgcagtggcactctcactgcaagctctgtctcccaggttcaagtgattctcctgcctcagctgccggagtatctgggactataggcctgcactaccatgtttggctaatttttgtatttttaatagagatggggtttcaccgtgttggacaggctggtctcgaactctgacctcaggcaatctgcccactgcagcctcccaaaatactgggattacaggcgtgagccaccatgcccagcctacaaatgttttctttcaaaactcatttacccgggccaggtgtggtgacttatgcctgtaatcccagcactttggaaggccgaggtgggtggattgcctgagcccaggagttcaagaccaacctgggcaacatagcaagaccccatccctacaaaaaatacaaaaatcagccaggcatggttgcgtgtgcttgtagttccagctactcgggaggccaaagtgggaggattgcttgagccagcactctagcccagcccattgatcacgctactgctctccagcccgagtgacagagcaagaccctttctcaaaaacaaaacaaaacaaaacaaaaaaaccgcacctcatttaactgttaacacctgtgcaagcacggcaagtaggtgtgaagggcctggtacattgtaataacagagaatggccattaggtggcgataaaagacaagcttcttgctatggtgtcgctgcccccgaggtcccctggctgtgaacccgagtcagggtactgctagttgacattagaaggtgggaagaggtatttgtcaaccagatggaggaaaatagacaaaaactctacttataattaatttgtgaattaattagtgtatcatttataaagcttttatccaagataactttattttgggccaaatgtgcatttattgtttgaatgcacatccttgcattatacaaaaggagcctaaattcagtcaacaactgattgcatgttgacaattttgataaagatacggggtcttttagcctctaatggggttctatcttatcaaataagtaaaaacagaactctgattattgaaggggttgattatccttttctttcgcaagacttttagttcgaatagaacatatgtccaaatatttggaaatatattcacgatcctaacaaaggcattcctttcacagttgtctaggttacttggctttttcactactttgttttggaaggactttcttggaagtagtaaaactgagttgggaaatctttaaaatgtatcagtgcatctggctgttttccaaatcagaagtcaggagattgttcaatgatgcggaaatgtactcaggtgtggaagattccagttggggaggggctcaggtggacaggtgtgagtagcatagagggggcgtggagtgggggcttaacctggggggctcctggttccagtccggcattctgtagatttagcacccggatcttgtcaggggaggtgagagaaacctccgaggcagactcccatgaatcaagctcacagtctaggcttacaatcagggtgtgggctttcctattatttttattcactaacactaacggagtgcctgctatgagccgggctctgtattaaaggcttcgtgtgttgccacagtaacccgatgaggtggataccatctttatctggcaaggaggaaactgaggcaccgggtttcaattcagtacttcggcaatggctgaaccgaagctgagatatacctgtgtcccactccaaagccacgaacagccttcccaacaagccctttcctctcggtcctggaccacagtacggttcctctacggtgcctggctggccgtgggcagtgtgcgccttggccccagagcgcctcctccgcctggctttggtcctcgcattctgtcttcagactcgatgccgttcgggccctggtgcaaggtgccttgcccttctcacttactatccacctattttgttttcttagttgcaccatcagaggtctattccattaccttcatcttccagttctttgggccgctagctgtggccgccaccaccagcgccagttacagagggaactgggtcactgtccacccacagggttctagaaattggtcagtggcctcagatccgaagtttcaggttgcagagagaaaatactaaaactgccacctgccttttccagcctggttgtccttggatatatcttgcccactgatgcggaaggacacacacacaccaataactcatttggttctgagctatcaactgccacgcagtgatgtgccagagttgcaaccagccccacatggtatttttagctgagagaacaactccttctagttgaggatggtttaatgagtgcgtcttaatcccatgacatgaattttagttcgttttgtagcaggtcaggtttctctgtagtccctgctttttaaaaaattatttttaattttaaattaaaaattttgtgggtacataggtgtatatatttatgggttatatgagatattttggtacaagcatgcattttgtttttttgggaaagtttttatttctccttcatgtttgaaggatatttccactgcatgtactattctggggtaagtattttcccttcagcacttcaaatatgccatgtcactttctcctggcttgtaaggtttctactgaaaagtctgttggaggtccattgtacgttatttgtttcttttatcttgctgcttttaagatcttttctttatccttgacctttgggaatttgactataaatgcctcgaggtagtcttctttgggttaaatctgcttagtgttctataactgccttgtacttggatattgatacctttctctaggtatgggaaactctgttaccttccctttgaataaactttctgtccctacctttttctctacctcctctttaaggctaataactattaggtttacccctttaggctactttctagatcctgtaggattgcttcattgttctttattcttttttcttctctgtgtattttcttatttttgatgcactttttgtttcaataatttttggggtacaggtagtttttgtttacatagatacgttctttagtggtgatttgtgagattctagtgcacctgtcacccaagcagtgtacctaatatgtaggcttttatccctcaaccccctcccaaacatcccctcaatcccttaaatttcattatatcattgttatgcctttgtgtcctcacagcttagtgctcccttataagtgagaacacatgatatttggtttttgattcccgagttacttcacttagaataatggcctccagctccatctaagtttgctgcaaatgacattatttcattcctttttatggatgagtagtgttccgtggttgtatatataccacattttctttatccacttgttggttgatgggcacttaggttagttctatatctttgcaattgtgaattgtgctgctataaacatgcatgcgcatgtgtccatttcatacaataagttcttttcctttgggtagatacccagtagtgggattgctgggtcaaatggtagttctatgtatgtagtctggagattcttttaagaatctccattcagttttccatagtgattgcactattttacattcctactggtggtgtaaaagtgttcaccatatctataccaacatctattgttttttgactttttcattatggccattcttgcagcagtaatgtagcatctcattgtggttttaacttgcatttccctgcattcgtgatgttgagcattttttttgtatgtttgttggctgtttgtcttcttttgagaaatgtctattcatgtcctttcccactttttgatgggttatttgttcttttcttgatgatttgtttgagttccttcaccagttatactaggtatggccattttacataatcccatatttcttggagattttgttcatttattttgattctgattgggttaattcaaaagccttgtcttcaggctctgaaattctttcttctacttgttctagtctattcttaaaacttttcactgcattttgtatttccctaagtgtgtctttaatttccaggagttctaattggtttttctttatgatacccatctttctggaaaatttttcattcatatcctgaattttaaaaaattcctttattttgtttttcacctttctctggtatctccttgagtagcttaataatcaatcttctgaattctgtgtctgctatttcaaggattttagattggtttgaattcattgctagggagctagtgtgatcttttggggtgttattgaaccctattctgtcatattaccagaattaattctctggttctttctcatttgggtagactattttttcaaattgttcttgaatgtatttgactgtatttttttctttaatttctttttttttttctcttaagggtctgacttcaatgtttatagtttattatagcctaatttgattcttggtgattttaggggggaagactccgtatgagttccttagttatagagagtctttgtgtgctggctttcccagatgttggctgtagtatttatgtacttggtgtatgggcaagttcactgtctcctacatggttggaatagcaaggatctcttgaagcttatctcattctcccattgtgaacagtttttaaatgtatttgatttttccccagcattttatttactgagttgatgatttaggcttcaggccagtagaggaggtaaccctgggtagacaccagttgtagctaaaacaggtaggtagctgtaatacccagtggtgggcgcaggttccagccttgatgaaggtgtctgagggagctctcaattagatgtctaaggttttatcagggtaaagggtgggagctacctcagctcccctgccaggccagcaggaaaactacttacctcccagcttcactcctgtcccagtgttctggctattcagatcagacaagcacttcttttcatctgtaggaatgttgatgttccaagtagagaggggttgtgactctgcctcccacgcaagcctaaatctgaggagtgctcctcctgtggggatgctatcaccctgaattgtaccagaaggctgaccataggtgcatccatgctgcatacccatgagagaagcaccagctgtgtctgcaatggtgtaccagagaagaacaagaaccccttttccaagacccttcatgtacagacaggctgcctgcctactggggcagactttccctactgtccctagcaatgcaattgtatctctgaaacttcccattagtggatagatctgggactcaagacctgctgtttagattctttcatctgggtattcttccctttgatgttgtattcctcctcttccctaaaaatgggaattcctgagaaccatactatagggattgttattgctctcctgggtctagccacccagtggggctaccagattccaggctggtgttaggaaatgtctacaagggatccagtaatgtgacctgtcttcaagtctcccatctgtagataccagcaccagctctgatggaggtggcaggggagcaatgtggattctgtgagattccttggttgtagataggcttagtgtgttggctttcttgaatgctggttataattgtagtgaacttgtcatgtggatagactcaagacctctggttagccagggtgctgtatgcagaggtgatagctgaggtcacatgactgttttctccttcctgggcacagtgttattctactcagaagtgctacaatggactgtgttggttggcctccatccaggaggtggtgattgccaaagagcactagctgtggtagtaacagtgggatttgagcttgccctaagttgccctgggaaagtattctggtttctcaggcaatgggtgaggctataaaactccccaaaatttatgtcctttgtgtaaagctactagagtgggtggaggggcacaaccaggttggggcagggttaggcaggtctgcactctgactctccttgagcagggttagtgacagctcccgcaagggttggggaaatttttttcatgctgcttgggtaatgttctggagaggagcataactgcctctgctgcacaggacagtttgcaaagggagtggggaaaagtgggtagcagtaagtctcatgcagctcccatgcatttggcaaggctgatctcactcctgcagtactctgctaacagtgctgggttagatccaggcagtctgtgcacagagctgcgccaggccatcagcttccctgcacagatagcaatcttggctttcaggtcacactgttccccatctgcccacaaggctgggtacccagctcctgagggtagtgtctgtagagcacttgccattcacccctccctagattctgctcaagggaatttgtccccacctgagattatattataaaattcagttgaaaacttcttaattcagttgaaagcttcttttaagttgtgacccctccctgagttcgttggctgacttctctgaggacccctgtgggatataatcaggaatggcttcccccagttcatgctggagactgggaatgcctgcaaggcacttcctgctgctgcttccacttttatctttcatgtcactccctgagtctgttccagctctgggtagagttaagaccttctcccatggcctggattttcagattccatggtgggtgtgtgtgctctggaggcagactctccccctctcacactccggggacttaaacagtttcttacttgtctcatagggtaggctgcagcctgccacttctttcaaaggtctgtggattcttttggttttcttgttaagttcctgctttgattcttggaaaaaaaaaattcattgtgaatctctacacagtattctttccttccaaatatgagagacacactaacactgcctccgatctgccatcttggaaaaaaacctgactgtgtatttgcaaatagcctgtcttcaagctcactgattccttattctgcttgatcaattctgctattaaaaaactctgatgaggctgggcatggtggctcacgcctgtaatcccagtactctgggaggccgaggtgggcggatcacgagatcaggagatcgagaccatcctggctaacacagtgaaaccccatctctactaaaaatataaaaaattagctgggcatggtggcaggcacctgtagtcccagctactcaggaggctgaggcaggaaaatggcatgaacctgagaggtggagcttgcagtgagccaagatcactgcactgcactctagcctgggagacagagcaacactctgtctcaaaaaaatagaacaaaactctgatgaattcttcagtatgccaattgcattagaagtctacctagtattctattgtactgcagccaagctggcactcaaatcattagacacagtctctcccgtttcaacaggcagaggagcctcagtcacatggccactattgccacaggcccacgaggagtactgccaggctcctgccaacgttcacttaaggcccaagggctcttcagtcagtttgtggctcttcagtcagattctggttaggccccaggaactagagtctttttaaaagctcccccagcctgctgccttgaaggatgctgaagtccctgcacttgctaacaccaacagcccaggggagctgggtcctgcctccaccagcattccagtggtggagcttcaatgaggctgggcaccatgtacagtgccgaagacctcctgatcactcatgggtacaaactgttgagagacctcccagcaccacgcagggataaccctgagggatgccagccagcaaagacaaggatgcgagtggtctgtggcctgctgaataggcatgaggatggccctgcggcctttgcacatcataagacacctgctgggaaagggcgtgggagtgactctgaaagctgccgcgccacactgagaggccacggggatccccagagcacttctgcttctagaacctctgaggcagggcttcataatcaaccaaccccagactgttaatgaccaagccaactggagaagaggagcgcgggaagtcagcagcctgctgggtccgagggacccagaagacctgcaggaatgacccaagcccacagtccgcccgtccacatgaggcagcgtccataggaagtcagaggaagggcagaggatgtgacgaataagacaacttggggccgggtgcagtggctcacttctgtaatcccagcactttgggaggctgagaggggtggatcacttgaggtcaggagttcgagaccagcctggccaacatgatgaaaccccgtctctactaaaagtacaaaaattagcctggtgtggtggtgggagcctgtaatcccagctacttgggagactgaggcaggaggatcgcttgaactcagaaggcaggggtttgagctgagaacacaccactgcactcagcctgggcaacagagagaaactcggtctcaaataaatagataaataagaaggcagcttgggaagaagaattgagaatgttgggtcctgccaagtggctgaacgtctgcaaccagccaaggaaattcaggtggcgggtgtctgatggtgatgggaagaaattatttcaagatctgttactgttcattcaaggagaacacgtgtcgaattctcaaaacaaagagaaatcccaattattgcctagaactctcccctctcccacccccatagccctccgacccacagcctgaattgcacagaaatttccattccattaaatgacagacatttacctaaaatgtcacagtattctcccaattatgcaacaaatttgaaattcacaagtgaccctgagaagggtggctccttggcctcttttcctcagcctaagtttgggagacccctcaagcccccatctgacggcttgcaccaccagtcccatagggagtagaaagtggtgactatcaggacagccagcagcggatccataagtccccaggcatgagctctgcatgtctgactttggattggagcctccagtaggtacctccaccatcacacaggtcaccccccagcacatcccaagcccctacttggaagacacagtgctcactcatatgtggcattcacggtcagcagcagcctccaactgagaaggccgggctggtggtcggcttccttgtggcccccttggaactgggccctgcaaacaccctcttacctcagggctccctccacacctccaatctgccactgcccatgacagcttcattcagtacattccctttgatgacccaaggatatgacatatcaaaccagctcaaccccagggtttctttgaggacacaaggtttggtgatgaatcttataactccagtcctgtcactgaccaagagccagctcatggaaaaatgctgatggtgccatttggaatccacagagcctgatagccttgtcagggaataagagaggcccggccttggctgatcctagccccttgtggccatgggtccagcttcccagaaatagagaaaatggtggctttcctgaccaaagagacagctgtgtcatgagaggatggcagcctgacgtgaggggcagccctcacagacacgcagaaagccaagtttcttccccaagcccacagggcgagggcactcatgaaactcaaaccaaactcaaaaagtttgaaactgggattcggaccaagaaaagttcaaagaagtaaatgaaaaccaaacaaaaaacaagactgtattttgtttgattttcatccctgtgaaatcagaatcacagctgccagatacaggtacggacaacaatgacttaaatctgagtgggtctgatgagagcacagctctgcaaccacagagtctgctgagcatgtcctccagcgacctggggctgcaggctgtcacaggaagcatgggtgggagaatggagctccagaaacaagatctgggggtggggatcagaagaagataaagcaatcaatgaccttggattcatttaccttacaaagcacagtgaactccagcattctggctcttggccagggcaccagtacagagatcagcaaacacaaaccagtttccccaaagaatcccaaagctcgcagctccttcctgttgcaaagctgggagggtctagtgtgtccctgactccaaaatgtttggaccctgctgcctccgaagctcagatgcacacggcagtcccttctggtgaccacaaatagaggtgaagtgcctgcaacctgaaaggtcacaggtccctcagcccagccggcaacagtgcttttccaaggacttccttgtccataaatcaggcactgatgacaaaagcaggctgaagtcagccctgtgtgggtgtctgtgggcatgcagtccatcccggcccaagtgggaggtggtgaaggaggtacccacatgtctgtgcaacagcaaacaatgatttgggcgttttctcctgacaccagtcagccattgtgcctgggcttattaagttaacgagtaagttttaacaaggagcttcaagaagacaaagaaggaagacaaagaaaacagctgctgcagcaatgaggaaacggaggcggaacagcagcaggaaaactgtgctgaccccagactggagaattcaggcttctgtgcaaacagcccggaaatgagttgagcaacagccaaggatgtgggtgctggaggaccctgggtttagttgggaaaaggtagacataagtctgagagctgaggtgaggagctggaacctggccacctgcgtgtctggcctctgtccctgggtccctctcaggtggagacgacagccatgcatcctccgggcagcagatgaaagcttgagagcagaagagagacaccagaaggttggcaatggaggtaatgagcccaggtcctgcaaagagagtgatgtcttcaagatcaagtgacacaaaaccagtgcccctctcctatccggctgagccaaggcgtcccaggaaagtcagaaacttaccagcactttcagttctgtgaaactgagtgaagtggccccttggaaggttgatagtggtggagagagggacacagtgctcccgctgtccctgactaaccagaaccgagggctcttggcaccagactttacaggctatggtgttcaccacagggcaagagtagagtgagccagcaagctagaggggtctttgagggaagtggatgcaatagaaaccctccaggcaagtccctgcaagtgagggctgtgaggatcctgggcattgaatggcggtggcatttctcctgccagtgccctgagggtggaggcagaaccagcctccctgaggtgagcgtctgcagcccagaggcccccaggcaagagtcgctgtccagctcagcactggctgatggccttatggtgtccactggtgccttttatggcaggagaaagtgtggctggactgaaagccctctcttggtaggggaagggaacagtgccacgtgggctccccaggcttctgagcactcagacctcacttagggttgtcaccaatggagcttccagccttgagtctcaggctaaccccttggagtccaagtccttaaaggaagtgggggcaaaactgcccttcatattcactttgttctacttcatagagaggactccaagtgtggcagactcagaaaagaggctcagaagtgctttcaaagtgattgaaagttcgcaagagaaactggcttccccctggccaggagagcagaccctgccacctgatgagaatggaagaggtgtgttgagtgtctattgagcttcaggagtgctgactccctggaggaggtggagggactgaaggcttggaggggccaggtccaccttccagaaggctctgtgtctctgagaggcagggacgacagggtcagagttggccactcactgtctttctccaaggatggtatctcacgggaagaaaatgagcatctggtgtccagattcgtatgaccctagcagagaggagagactgtgatgagatgccagtgacgcttgcgtgcgtttgctgatggagtattctcttatttgttgttgttttcttttccttttctctttcttcactgttcatctgcaagagcattctctgattccgtctatgtaggatctggaaactgctggtttttaatgtactgatgacattctttaccactgtcactaggaaacttaccatccacacagaattgctttgtggagataaagcaatagtccgttgaaataatccttttttaaaaaattaaatttaattgattaattattttttgacgcagggtcttgctctgttgcccaggttggagtgcagtggtatgattttggctcactgcaacctctgcctcccagattcaagtaattctcctgcctcggcctcctgagtagttggaattacaggcatgtgccaccacgcccagctaatttttgtatttttagtagagacagggtttcaccatgttggttaggctggtctcaaactcctggcctcatgtgatctgcccacctcagccttccaaagtgctgggattacaggtgtgagccaccacgtcaagccctttattaaattttaaaaaataaatgagacgaggtctcactgtgttgctcaggctggtctcgactcctgagctctagtaatctgctagcctcccaaagtgctaggagtataggcgttagccaccatgcccggctgaaatcattttttatagcatgaagatttaatgcctataattaggaaagagttttcacagaaaccctccttcatgaaggatttggccaaactggcaaatagtttggtgtttctgtggttctgtgtgaaaatttagacacagaagatctagtgaacgattttaaaggactgtgaatgccacacattctccttcgtgtctccgtgccctgtggcccatgctcagtctttgcagacgtaatcaagttaagatgaactgactcggccgggctcggtggctcacgcccgtaatcccagcactttgggaggctgaggtgggcagatcacatgaggccaggagtttgagagctgtaatcccagccactctggaggctcaggcaggagaattgcttgaacccgggagttggaggttgcagtgaaccgagaccgcgccattgcactccagcctgggcgacagagcgggactccattgcaaaaaaaaaaaaaaaaagatgagctgaccctggagtggggttggccctaaccaatgactggtgaccttctaacgagaggaaaccccatgtgaagacagagacacttagggagaacgccctgtaacgacacaggcagagatcagaggaatgaggctgcaaaacacggggcgggaaggattggcagctgccagcagaagccaggaagaggcaaagaggattctaagcagagcctcagagggggcgtggccctgctgactcctttgatttcagacttctggcctctagaactgtcagagagtaaatttctttgtcttaagccatccatctgtggtgctttgtcaggacatcccaggacactgacgtgcttggcttctgtgattctttccgttcctacctctccctccatctctgcctttcctttcacttttcaccctttaaataggaaaatttctgaaggaccagtccgtggctctctattcttctccattgattctttcttctttggcaatttctttcattttcatggttttgctatagatcctgatgattctcaagtcctgtgttagcgaggctattggttgcaaaggttggggcctccctcaagccacctttaaaaaaggatgcttacccctgcacatcatttagaatggctactataaaaaacccagaaaataacaagtgttagtgagggtgtggagaactgttagtgagaatgttaaatggtgcagctgctacggacagtggtaaggagattcctcaaaaaattaaaaatagaattatcgtatgatccagcaattccagttctgggtatatgcccaaaagaatggaaagcagagtcctgaagaggcatttgtacacctgtgttctaagcaacattattcacaatagccaaaaggtggcaccaacacagatgtccatcaatggatgaatggataaacacaatgtggaatgcccatacaacagactattattcaaacgttcaaaagaaaggaagctctgtcacatgctacaatatgaatgaaccttgagaacacactaagtgaaataagcccgttacaacaggatgagtgctgtatgataagtggaatcatacagtacgttgtatgagtcatcaaatggagacagcgagtggaatggttgttgcaaggggtcattatagtttaatgtgtatagagttttagttttgcaagatgagagttctggagatacgatcataaagagcaaacaaggctgagaagacccacttgtgtgcgagcgctgagggtagttttttagggtacaggctgagaaagcaccccaaaatgtactgactacacccagaattcaaagcacctgcaggatgtctccatgtggatgtcctgcaggtacttgtctctactaaaatacaaaaattagctggtcgtggtgttgcgtgcctgtaatcccagctactttgggggttgaggcaggggaatcgcttgaacccgggaggcggaagttgcagtgagctgagatcgtgccactgcactccagcctgggcgacacagtgtgactccgtctcaaaaaaaaaaaaaaaaaaaaaaaagtcaaagatttaactcatcttgattccaaagcaattttcatcttgatgccaatatctaatctttcagcctttcagccattgtgccctggcactgtcttaaaaacttttttcttgttacaaaagcaacatatgttcatattttttaaagaagatatagataagtaaaaaataaacataaaataatttataatctctgtgcccagaaatagccattaatatcattgtaacgtatcttgccattatttttctacacaatcatcagaacttcatgtacatgtagcatgttcttatccatgctatccaagtctttgcttattcgtccgactatgtccacatgcctgagtcttacttgtaggttaagacccagcttgaggtcacgtctgtcattaagctttactcactattgccatcagagagtatttactactccatacttgacctctcagagcattttaactaacctttctcgtgatacaaatcattttcatgtaagtcagagctctccttcagtccagtagtttttaatttttttttttttttgagacggagtctcacactgttgcccaggctggagtgcagtggcccgatctcggctcactgcaacctccacctcccgggttcaagcaattctcctgcctcagcctcccaagtagctgggactacaggcacgtgccaccaagtccggctaattttttatttttagtagagatgggtttcaccatgttggccaggctggtctcgaactcctgacctcaggtgatctgcccgccttggcctcccaaagtgctgggattacaggtgtgagccaccacacccggcctagtttttaattttttaaagccataggattctgttcaaatgggtccctagcataaaaaatcagatggaaagagagctgctctgactgtagttacagagaccttgaaccccaaggggactaaattcagagctcgggttgaaagccctgtactagattgcaggatttttagaaaatacattttattgaggtttaattcatccagcaatatgcaccctttttgagtgcacggtttgatgagttctgacaagtgtgtataaccaatgcccctgtcaagacacagattattcctgtcatgctgtaaagctctcttctcctgtgcagctaatccctcccttccacaggaccccaggctaccgctgctgttttctgacattacggattagattttcctttcctggaactgcatgggaatgagtacaacagctatttcctctttttgtgcctgggttctcttcctccacatgtgtttgagactcacctgtaatgtcgttaatatcagtagtttgttccttcttttaaatttattttttatgttattcatttatttttaagatttttttaaaaaacttacattttaaattttttattttttattttatttattttaattttatttatttttaattgaatgaatttaatttttaaatttaaattttagttttttatttttattttttatatacataaatttgttccttcttgctgagtgtggcattaccagtttgtttactcacactcgacatttgagtcattgccagttttggggtattttgaataaagctgccacagacatttgtggataagtctttttgagtatgaatgtttttatttctcctcagtagatgtcaagtaaaacttgagatgataggtttctgaaaatagaatccatgtctctttcatttttgtgatccagagcgcactgcattgagccagtgttaaatgaacttcttggtaagaaaagggaaggaatatttagtaaatgtttactaattgccagctactttttaaaggattttttatatattgtcatatttagttttttcaacaaccatacaatgtgttatttttacagaattttctttctttctctcttttttttttttttttgagatagcgtctcactctgttgagcaggctgaagtgcagtggcatgatcatggttcactgcagtgtcaacctccagggctcaagcaatcctcccacctcagcctcccaagtagctgggactacaggtgtgcaccaccatgcctggctaatttttttatttttacagagatggaggtcttactatgttcgagaccaggctgttctcaaactcctggactcaacaatcttcctgccttagcatctcaaaatgctggaattacaggcatgactcactgtgcccagtccagaattttatttctaactggagagttagaggcttggaaaagttaagtagcctgcctaggagcacacagctaataagttaatagagctaggattcaaaccctctgttggactccaaaggccaggtttatttcttagtattatttttggctgcctgttgaatcagctaagttgatttaacatgtgggagagtccgtaaattctcccgagagcctctgtgggctcagcagagcctttctggccattgaagtaggtcaggtcctgctacagtgaagtttaggagtcagtctttaactctgggacattgtccattctgtcgtatcatttactgttgaaaataagagcatttagctgggcatggtgttggacacctgtaatcccagctactcgggaggctgaggcaggagaatcgcttgaatccaggaggcagaggttgcagtgagccaagatcatgtcactgcactccaggctgggtgacagagggagactgcatctcaaaaaaaaaaaaaataaataaataaataaaggagcattgtcagctgaatttttaaagattcacctgaattttccttgttatcaaccttttgctggtaagccactaattaattgtcacctgtggaaatttagacgaattttctagctttttatgtgttgttgactcacaataaacaacacttccacaaaatctatgggcttttctggaggccttttcttgagcgatgggactcttgttgaaaaggaactttgaggggttcagcgttctttacaatttcctatcaattcatctcctccaggtggggaggcctgtagaagagagttgtgaacagagtgctgtgtggcacccaacaccatagatatggcagggtggactggaaatggggtcgatgcacagctgggatgctctggtttgtccacagtgattcccacaatattgaaatgcttttgtttctgtaggtaaacagcaggctgccctggctcctcccctagagctctctcctctccaacatcttatgctccagcaatgaaagcgttggcacccatctccgcagggggcctctggaccctgtgccaatgccctggccaccgtccattctcactgcttggtcccatgacaccaaattgttaaatagttggctattgacctcttggctaaaagttattttcaaaacagaaatgtacaggcaacaggccaatcacattcttaatttgtaaccacccaaggggttcaccttgcccactgcctagagagccgattcatcaagacaggggaattgcaatagagaaagagtaattcacagagagccggctgtgcgggagaccagagctttattattactcaaatcagtctccccgagcattcggggagcagaatttttaaggataacttggtgggcggggggaagccagtgaactaggaatgctgattggtcagggaggaaatcacaaggcgtcggagctgtcttctggcgctgagtcagttcctgagtgggagccacaagataaggtgagccagttgatcgatctgggtggtgccagctgatccatccagtgcagggtctgcaaagtatctcaagccctgatcgtaggagcagtttggggagggtcagaatcttgtagcctccagctgcatgactcctaaaccttaatttctaattttgtggctaatgttggtcctacaaaggcaatctagtccccaggcaagaaggaggtctgctttgggaaagggctgttgccatctttgtttaaactataaactataaactgtaaactaagtttctcccaaagttagttcagcctatgcccaggaatgaacaaggacagcttggaggtgagaagcaagatgaggcccgttaagttagatctctttcactggctcagtcatcgttttgcaaaggcagcttcaatctcactttccattattcttatctcactcttcattggagtagtcctcccttatttgtggtttcactttccatggtttctgttacctgcaataaatggaggtctgaaaatgggtgagtgtagcgcagtaagatattttgagggtgggcacaatggctcatgcctgcaatcccagcactttgggaggctgaggtgggaggattgcttgagtataggagtttgagaccagcagggcaacatagtgaaatttctccacaaaaaataaattttaaaaaattagctgggtgtgatgatgcattcttgtagtcccagctactcggaaaaccgaggtgggatgatcactggagctcagaaagtcaaggcgtcagtgaactatgatcgcaggactgcgctccagcctgggcaacagagcaagaccctgtctctcttaaaaaaaaaaaagatattttgagagagagagagagagagactgcattcgcataaattttattgcagtatattgttataattgctttatttttttatgagtaattgttgttaatctcttgtgcctaacttataaattaaactatcacaggtatgtatagataggagaaaacagaatatacagggttcagtactatccaaggtttcaagtatccactgggtgttttggaacatatcccctttggataagggggatcaccgtatgacaaaagccattgttttttgttttgattctgatctttctgattcctacatatactttaagcacaaacaatttggttaaagtctatttccaagtttctgtggtgtagaggaggaaaattttagtttccctctgctcttcacagttattatttgggatggactcctgtaacaaaagacagattaacaagagaaagacaaacggaagtttattaacatgcatgcctcctgtgtatgtgatagatacccagagagatgagtcagtctcaaggaggagactttgaattcaggcttaaatatttaataccatcttcagctgtcacaaagaaaggtgttgctggcaggtgtggggaggtaaccaggaaaagcagtcaaaaagggtaaggtttgttgtgcagatttgagtcatccttgtcttcctggtacagagggggaggcaccctcataaatggagggctcctttacagaagtaaatttcccttacaaaagggtaactgcctctgtgttctcagggcttcttctgtgtcagcagtttctcaaaataatccttatgcccaaaaggcatattttggtgggggcaggttgtggtctcctacactggtcatgccaaagcactggcaaacattatagtgtagcagttatgagcatggattttaggatctgacaagcttcaattttgatttctggctctgttacttcctagcatggtgatctttgacaagttatggcaagtcatacaacttttgtaatgcctcagttttctcacctgtaaaatgaatatgataatgtctacttcataattattagagattgttagcagcagtgaatccttatgggtctgcagcaaactcaattcttgcttcctcagaagaaagaatttgacggaaggacataaggcagagggagagaccgaggcaagtcttagagtaggagtgaaagcttatgaaaaatttttaggggaagaatgaaaggaagtgaagtgtccttggaagagggccaagtgggagagacaagagcactgtttgacttttgacttggggtttcacatgctggcttgcttctggtgtcttgcttctcttctttccttattcttcccttggggtgggctgtccacctgtgctgtgacctgccagcacttgggaggggctgcgtgtacagtgtttactggagttgtatgcatgctcacttgaggcattcttcccttaccagccaagtgttcctagaggaagatcatgtgccacttaacaccgccattttgccttctagtgcgcatgcttgagcccactcgtccaactcctgagatcttctccagaagctgctgattaccagtttcaggttttttctttctactgggagactgcctttccctggcgctagctgtgaccaattattattttagtgcttaacaaccgcctggccatcaactcatggttgcctgacattcctggtgtgatggggccctcttctgccctgctcatgtctgcccgactacctactgcaataagatcacggaggggatgggtgcaaagaccttgccccaagtgctccctgcatgctggctgtgttacacatttcaggggaatttttatagattcattcaatgctgagtgttactttcttcagatattggaagctgtaactgttaattccaaaagagctgcttcttttgctttaaagtgactttattttgcatgagttgatttcagctccatgcctgtcttctttttttgaatggagaacttctttcccaaaggagcagttgattttaaataacagaaaaaacaacttgtaaaggtgaagaaacaaacttaaggcttgagttttgaacttagggtttcaacttcctttgcctataagtaggaaggatggagatggccactatgtaccttgcatataaaatcagttgaacagaaaaaagtgcagcttttctgggcagaagaaacagcgatcatcttggggacaagatctttgttcccaaactgggaacaaaaagaggtttaattggacttatagctccacacggctgtagaggccacaaggcttcagaatcatggtgggaggcgaaaggcactccttacatggcggtggcaaaagaaaaatgaggaagaagcaaaaacggaaacccctgataaccccatcagatttcatgagacttattcactttcaaaagaatagtacaagaaagactagtccccatgattcaattacctccccctgggtcacttccacaacacgtgggaattctgagagatacaattcaagttgagatttgggtggggactcagccaaaccatatcattccggaagaccatggcccctccaaatctcatgtcctcacatttcaaaacaaatcatgccttcccaacagtcccctaaagtcttaactcatttcagcattaacctaaaagttcatagtccaaagtttcatctgaggcaagacaagtcccttccacctatgagcttgtaaaatcaaaagcaagctagttacttcctagatacgatggggatacaggcattgggtaaatacagccattccaaatgggagaaattgagcaaaacaaaggggttacagggcccatgcgagtctgaaatccagctgggcagtcaaattttaaagctccaaaatgactgcctttgactccaggtctcacatccaggtcacactgatgcaaaaggtgagttcccacggtcttgggcagctctgcccctgtggctttgcaggctatagcctccctcctggttgctttcacgggctggcgttgagtgtctgtggcttttccaggtgaacgctgcaagctgccagtggatctaccattccagggtctggaggacggtggccctcttctcacagctccactaggcagtgccccagtagggactctgtgtgggggctctgatcccacatttctcttctgcactgctctagcagatgttctccatgagggccctgcacctgcagcaaacttttgcctgagcatccaggtgtttccatacatcttctgaaatctaggtggaagttcccaaacctcaattcttgacttctgtgcacctgcaggctcaacagcacatggaagctgccaaggcttggggctttcaccctctgaaaccacagcctgagctgtacgttggcccctttcagccacagctggagcagtgggacatggcaccaaatccctaggctgcacacagcatggggaccctggcgccagcccacaaaaccgctttttccccctgggcctctgggcctgtgatgggaggggctgtcgtgaaggtctctgaaatggcctggagacattttccccatggtcttggggattaacattaggctccttgctgtttatgcaaatttctgaagccagcttgaatttctcctcaaaaaatgggtttttcttttctattgcatcgtcagactgcaaattttctaaacttttatgctctccttcccttacaaaactgaatgcctttaacagtacccaaatcacctcttgaatgctttgctgcttagaaatttcttctgccagataccctcaaacgtctttctcaagtttaaagttccacaaatctctagggcaggggcaaaatgatgccagtctgtttgctaaaacataacaagagtcacctttactccagtttccaacaagttcctcatctccatctgagaccacctcagcctggagaccactttattgtccatatcactatcagcattttgggcaaagccattcaacaagtctctagaaagttccaaactttcccaaatgttcctgtcttcttctgagccctccaaactgttccagtctctgcctgttacccagttccaaagttgcttccacaatttcgagtatcttttcagcaatgcccaactcccggtaccaacttactgtattagttcattttaacactgctgagaaagacatacctgaaactgggaacaaaaagagtttatttggacttaaagttccacatggctggggaggcctcagaatcatggcgggagacgaaaggcacttcttacatggcggtggcaagggaaaaatgaggaagaagcaaaagcggaaacccctgataaactcatcagatcttgtgagacttactcactatcatgaaaatagcacgggaaagaccggcccccacaattcaactacctccctctgggtccctcccacaacatgtgggaattctgggagacacaattcaagttgagatttgggtgtggacacaaccaaaccatattagggcttaaacctttgatttgaaatctttaatggcaagtatagtgattcctattctgtacagctttttttttttctttcataagattgtattttttctttccttttttttttttttttctggaaacggagtcttcatctgttgcccaggctggagtgcagtggtgccatcttggcttactgcaacctctgcttcttgggttcaagtgattctcctgcctcagcctccccagtagctgggactacaggcacctgctaccacatctggttaatttttttttttttttttgtagttttggtagagacagggtttcaccatgttggccaggctggtctcaaactcctgccctcaggtgatctgcccaccttggcctcctaaagtgctgggattataggtgtgagccactgtgcctggccaagattgtatcttttcaattgaaagaacatacacagcttaaggacaaaagcgataacaaccttcactctaaaactgccagggtgtaaagatgaaaagataggctttgcagtgtgtgcatgcatgtctgtgaacagatatttgtgcatgtgtatttgaggaaaataatagcaccaagaagatggaaacactgagcaggaaaaggagctttgggaatccccaggttaaatgcacacttctcactatggcagtttgttgagccacttggttcctcctttaatcacacattgatgcaaagaaaaatgtttagagagggtggatatagtttgctaaaagattgtgattattttcctatagaagtgcttcctttgtggacattgtcgaggccaagagaaataacttccctttcaccctctgaagtttccctgaaaatcatgacaataggctgattgataggagaaaaggcacacacatgcatttgatcatagttttacgtgacacaggagacttcagaatgaacaaccaaagagggaaactgtccatttttatgcttaggttcaacagagtatggacagctgtgtagagatatgattggatgaaaggggtaagacctaatgctgataggctgggaggggaaatccggcaaggcctgtctgtctagattcttcttggcttctctgagcaacatcccttccttctgggtatgggaaggaccctctctggaacagaagccttatgacatacaatcaaacaacgtaggtctgatcatttcttaaaaaaattttttttaaaataaaaatggagatggggtttcaccatgttgcccagtctggtctcaaactcctaagctcaagtcatctgtctgcctcagcctcctaaagtgctgggattacaggcatgagtcaccattcacggccttgataatttctttatggctagtttttacacagaaaggtggaggaaaagttagagcaatattttttggtttatagctggctttggggaaaacggattctggtttctatgcctagcctcagggaaacgtgagatggataacatgagggcaggagaaggtcagacgaaaacttttgcttccaaggtctttgttttgagtatcattttctgaatcccaacattccctggtctgaaactttcccaagaagtttcacagtccagaaattggattggtggattgtcttataagttattgagccaggatctcagtcccaaaaatggatctcatttcaggcttccactaaggtcaggcctctatatgatttgagcaatcatatatttaataagaggcatttctggctgggcacggtggctcacgcctgtaatcccagcactttgagaggctgaggcaggcagatcacctgaggtcaggagttcgagaccagcctggccaacatggtgaagccctgtttctattaagaatacaaaattagccaggcatggtggtgcgcgcctgtaatcccagctactggggagtctgaggcaggagaatcacttgaactggggaggtggaggttgcagtgagctgagatagtgccattgcactccagcctgggcaacagagcaagactccatctcaaaaaaaaaaaaaaaaggcatttttatagaaactgaagaaaataaaaacaaagattaatggttagggcaaactataaactcagttttttgagtctagagagcagccagttgagaagaattgtaggtgctgggctcaaagcacctgcagataaagagagcagacagtgagaatctgacagttttcctggtttgcagtttgcatcaggcattccagtgaactttctgtgtaatctatacatcgacaggcatgaaggctgtttgtctattacgttgctgtagtgctttaacccaacatttatataaaattgtctagtttcagcttgcaggactttaaaaaaagttcagttttaatttctagtgttccaagtcagtaaaatgggagaaaaacgtggaaggaaatgttagtttggagacttgttgcaaggaaagaattcaggattcagtccaaactgtaggaaaatcagccaggcatggtggcttatgcctgcaatctcagcactttggaggctgaggtgggtggatcacctgaggtcaggagttcgagaccagcctgggtaacatggtaaaatcctgtctctataaaaaatacaaaaattagctgggtgtggttgcagatgcctgtaatcccagctactcaggaggttgaggcaggagaatcacttgaacccaggaggtggaagttgcagcgggttgagattgcatcactgcactccagcccaggtgagagagcaagcctccatctcaaaaaacaaagcaaaacaaaacaataaaaaccaccccaatggtcaggactaaaatctagtaacaggtatactatagctttcttctgaagcataatttttctctctctaatcccccatttccgccaaaaataaatcatagtaggaccaatttatttgcaaaataagttttagtcttattatccttggcctaattatttgcatgaagtacagcaagaatagtgattgtcgtataagctctttttaagcttgctttgctggaccattttcatgaggaatctctgattagactttcaaaaatcttttgaggctaggaagccaagccaaggattcaccctctggttgtgcttgtatcacctgaatgaattgggtgatttctgtcttcttaaggtcctccaaatatcttgacgctcctagtcctgtcagaaagtgacattctttacttaccataaggtcagaaacactgtaagggacctgtgcagacaaggtaccaggccagtctttttctaaggctattggcttataaagttgacctcaatccctcaaagcaatctggtcccctttgaaaatacgacattccagtcaaagccttgataaaataaccagtgtttccaatgtttcctgttacaaaaagaaaagagattcttataaaacttatacaaaaaaacatattgccataaaatgagaatactaatgaatagttttgaaattttggagaattcaagtagacagaatgtattttaattttgcttacaaaagtatactttaccaaattgctgtaaaccataaatagctccaaaaaagtttccttgactctggaaaacaaaatataaaaataatcaatgtttctgatatggtttggctgtgtccccattcaaatctcagcttgaattgtatctcccagaattcccacctgttgtgggagggacccagggggaggtaattgaatcatggtggctggtctttcctgtgctattctcctcatagtgaataagtctcatgagatctgatgggtttatcaggggtttccacttttgcttcttcctcattttctcttgctgctgcgatgtaagaagtgcctttcacctcccgccatgattctgaggtctccccagccatgtggaattgtaagtccaattaaacctctttttcttcccagtctcaggtatgtctttatcagcagcatgaaaataaactaatacagtttcaaacaaaaagtcataaaaaatcatttcagtcctctatcagttcagtcccatgtaataatttttcttctgcctgatggtgggttagcaatcttcatgaactcatcagttttaaaattagagttctgaaggttttacctaattcagtggtatgctctacaaagttatcagaaacctggattcaagagtactcatcagagtccagggtcaccttcataaatttccttgaagacacaacactaggatttgcaaaaaggttttagagtaaaatcaccagaatgaagcaatttactgcatacactaagacctatcagagtttaggaatctcatacaattttggaacacatttgaataacatatccatacaaatacaattcaaagaatgttaactcaaaatcgtttcttatttgccaatgtttctaatgtaattttaagatgccaagcttgaaaagcagttggatttctttacttaatttataagcactcatttgtttataaatccatttggtaccatgtagataatatgacatgaacttatgtatgcataaaaatacagagaaacataaatcaagattttatagcttatattttaaaattttagccatgaaattttagtgtccatttacagagtgccatttgaggtacatttagtgccatttacagaggcacaatttaatccaactgtccttctaaactggtgagttttactagacaagtaaagttttactagactagtaaaactttaactagtgaaaaagtaaagttttactgtaaaagttttactagtaaagttttactagtctaataaaactcactagtttagaaggacagttggattaaattgtacctctgtaaatggaacaagttatggccaaaggccttaccaaattttagataaaatggttgcatatttgcacctcaaagcacagaacaagaatttgaacgtttaaaaaggagtttgggtgttttaaagggagattaaaaatggatgccaatgtaacacaaaatcataggaatttgccctaggattttataaggagaccaatttcatttggataggtagcttctaatttaatctccattttccaactagaccactgagcttagggtgaagcccactaacaaataatgccaacaaagcatttgtaattttcagggaataatgcttacatatgtgaaaaacaggtgccgctggaaggtggaacacctagatcccccaaaattaaggatcttagtttcacattgaattccaggttcccaaaaaagggacctctggaccaggctgtgcaacacttccacagccctttccttagttcatagatgcctgtcttctaactgtgtcctcatgttaggggtgggagtggtgagggagctctctggggtcttttataagggcactaatcccattcatgagggcttcaccctcatgacctaattatctcccaaaggcctcacctccaaatagcctacattgagtataggtttcaacatattttggggggaaacaagcattcagataatagtgacatagaacatatgaatatacatgtatttgttatggttgctttcctcatgaggcaagtggcataactgtattcactagattgaaatagtttttaaataaaaaggaatgatttaatgaggctaagaacattttaagaactttaaaaaatatgagttcattttgaaataattacagggctaaatttggactggtctgactttgaatgtcatgtttggctcactgtagtatatttgttgtctcaatgaatgtgtgtttttcatattaaatagagttggtggcagagctgggactcaaatatggatattatggcactcagtggtcacacttaggtgaggctggatgctccagcccctgttgcggagagaactgggaatttcatcgggtgctgtttctccagtcttgcccatgttcactccactgccgtcagacacatcaaccttatcatgccactccactgcttgaaatactttgtctcctgcctagggctttcagcataaaacacactctttatatggccaatatattagttcgttctcacactgttctaaagaactacctgagactgggtaatttataaagagaagaggtttaactgacttgcagttctgcaggctgtacaggaagcatgctgggaggcctctggaaacttacaatcatggtggaaggtgaaggggaagcgagcacggtcttcccatggtggagcaggagagagcaagatttggggaacgtgctacacacttgtaaacaaccagatctcatgagaactctgtcaggagatagtactaagcggatggtgctaaaccaccacaaaccaccccatgatccaatcacctccctccaggccccacctccaacactcaggatcacaattcaacatgagatttcggtggggacacagagccaaaccatatcagcagagaaggctctacccgttgagaccctgctttccaacactactcgtctctctccatttctgcattatactctatgctgcagccataggtaaatggcttttttgttttaaactgtcccatgttctgtcttgcctctgagcctttgtccctgctgtccactctcctggaatatcttactcatctgcaaaaccagaaatcccccatccttcatgttgtagctgagatatcagttttgtggtgaagccttccctgacctcttccaactcccttctgtacccagttagcttcccttagcagtttacacactatgtttgtttataattctcattgccttcttaaattataaacccgaggccatcctggaaaaatgaaggagttagccacagcaatcaagacttccaggagatgcaagtagtcaagcctatttgctccctttcaggtgatgcagagagtgtggaaacaccactgttttggcctgttggtgcctgtgatcatgtagctgttcctgaatactttgttagttctgagaaatgggcagtaacagaacttgatgatgggcatttcttaatctcagtgtacatgcacagaataccaaaagcagtttaccttcctttattgggcagggacagcaatgtactgtgctaccctgaacacaaaaaaaaacctgtataatttagcctttgttatacaatcattgtgtacttctatcatgtttattccttaataaaacatgtctggagaggacagaatcctggatgcaactgaaatcctggatgaaatcagaatcaatcagttattaaaatcgttatgaataaattgagttaaaaagttaagttcaggaggctggaatatgtagctccatttgctcaaaaaacatgctaacagattgccatttaagtgcagcgtttccagatcacatttaggttagcattgtgggcgcacatgtggcgtcttcctttttcctgctactccagccactttgctgttccttggacaacctaggtacattcttgcctctggatcttgctgttctctgcctggcatgctctccctccctccacatgtaggttttgtttagatcatctccttcaggggtctgctcaatgtcgtcttatcaacaaggcctcccctgactgcttgatttaaaatgaaactccttcctcaaaaagttaaacatggatacagtgagctttgattgcatcactgtactctggtctaggtgacacagagagactctttctctaaaaaaaaaaaataataaaacaagaaaacaaacaaacaaaaaaaccacatggagttactctgtgactcaataatacccttgtatgtatacgcccaagaaaaatgaaaatctgtccttacaaaagctcatactgaatgttcatggcaacaatattcataacagccaaaaggcaaaaacaacgtaaatgctcatcattagatgaatggataaataaaagttcatacataaaatggaatattattcagccaaaaaagaataaagtaccaaagtacccatacatgctacaacatggatggatcttgaaaacattatgctaactgaatgaagacagacataaaaggccacatgttgtataattccatttatatgaaatgtccagaataggcaaatcaataaagatataaaggaaattattagtagccagtggctggggagagggggcaatgaggagtgactgctaatgggtatatatatatatacccatatatatatatgtttgaggagatgggtgggtaatgaaaatgtactagaagtagatagtggtgatagttgcacaattctttaataatactaaaggccacaggcttgaatagtttaaaaggatgaattttatgatatctgaaatatatctcaacaaagctattatagaaaaatttgaactccctgtctttctggcgctcattattcttcattcctgctttatttccttgttattcctacctaacataacatttgtagagtttgctgtctgcctcactgtactggcttacaaactccgtgtgatcagacatttttccctgtgttgttcactgttgtattcctttgccctaaaacaccgcatacagtaaatcaataaatctctgttgaataactgactaaataaatgtgactatatatacactaaagctagtgcaaggatgtcatttgaaaaagataaaaagatcattgctcaggtaaggaaaagagaataaaagcagagtcactttctttttttttaattttattttaagttctgggatacatgggcagaaagcgcaggtttgttacctcagtatacatgtgccatggtggtttgctgcacctatcaacatgtcatctaggttttaagccccacatgcattaggtatttgtcctaatgctctccctccccttgtcccctacccaccgacaggccccggtgtgtgatgttcccctctctgtgtccatgtgttttcattgttcagctcccacttataagtgagaacacgcaatgtttggatttctgttcctgtgttagtttgctgagaatgacggctttcagctttatacatgtccctgcaaaggacatgaactcattcttttttatggctgcatagtattccatggtgtatatttgccaaattttctttatccagtctatcattgatgagcatttgggttggttccaagtctttgctattgtaaatagtgttacaataaacatatgtgtgcctgtgtctttatagcagaatgatttataatcctttaggtgtatacccagtaatgggattgctgggtcaaatggtatttctggttctagatccttgaggaattgccacagtgtcttccacaatggctgaactaatttacactcccaccaacagtgtaaaagtgttcctatttgtccacagccttgccagcatctgttgtttgctgactttttaataatcaccattctaactggcatgagatggtatctcattgtggttttgatttgcatttctctaatgaccagtgatgatgagctttttttcatatgatttttggccacataaatgtcttctttggagaagtgtctgttcatatcctttgcccactttttgatagggttgtttttttttcttgtaaatttgttttaagtttcttgtagattctagatattagacctttgtcagatgggtagcttacaaaattttcctcccattctgtaggttgcctgttcactctgatgatagtttcttttgctgtgcagaagctctttagtttgattagatcccatttgtcaattttggcttttgctgcaattgtttttggtgttttagtcaagaagtctttacccatgcctatgtcctgaatggtatttcctagattttcttctagggtttttacggttttgggttttacatagaaacagagacactttcatattagattaatataggaaaaacaactcagtgaaaccaggttttgattgaaaattttagcacagattatgactttgtaagatgtgagactctgtcagtgaataactgaagtctcttttctgggatcactttgctcacaattgtgtgggtccagaaacaaatgtttggccctttactctttgcttccctcaagaaaaacttgctttcctgaagtatattaacagaaaatttgaggtccactaaggccaacagatcagatggtgactgccattgaaaagatagtttgttatttgcaggtcccaacagaaaggaccatgtcacaccatggagaccacctggggaagcaccagggttggtcagctggtagagggagggggtatctgtgggaagaaaggcatgagacagggcaggaggggagtctgagagcccaggaaaggaggcggttgtgttatgaattggttagtttacatttgaaaagctcactctcaggcaagctgtttgctactgctactgaaacaccaggggtttggtctaggtcctgctgctcatcacacagaaaatgatgaccaagatgatgattgtttccaaggaaaaaggctttaatagggtgctgcagcccaggagatgggagctcagtctcaaacccatctccctgactgactaaaaccaggggtttgtgtggcagggaagaaatgtaataatgtgtaagaaaacgggaactagggaggggcaaggaagtaatcatgatgaatgagaggtccggtttctggaacggtgatctggtaagtttcagttctttgatacttttttgagagggctgaaagtcctttcatgagaaaagaactcagataaaacaaatacgtgtttcaagttttaagactccgaaaggtcaatttctatgtttatccaaaagaacagtctatgggactattgggatggtttcactatctctaggaaatgggtaaccctggaggtggaggagcagtccgtccagggtcagcaaggctccagatgtcacagaatcagaataaagaaaataaaagacagggttaatacacctgaagtgtaaatagtactagatcttagatctcgggacccaagatgatcctgaaatgccttgttttgggaacacaaaagtatttggggctgctgctggaatgggcaggagaccatttatgaagatgttgctacctcattttcatagtaaaacttccttttgggaaacttcaactgctcagagaagaaaaggatgtttcctataccgaggactggctacataatttgtagggctcagtgcaaaatgaaaatggcagactctttatttaagagttgttgaagccaggcacggtggcttgcatctgtaatcccagctactcaagaggctgaggcaggaggatcttggaatgtctaagcattgaggagttggatctgaaaagcagtgaatacagcaagaaaggacaagccaatctgtaagaaccttgggtccatgaagatatggaatagatacttaaagatactaatgtgacttgtgcctatggtgaaagtagtgtcacaaggaattaaatgttgtttaagacatactgtaaaatgatcaaactacactacaggtgccttgccaacacccagatgttattactccagaactttggatctctactatatgccaattttggtgaacacccagatgttattactctataactttagatctctgcagattgtgatgctggagcctgtgaattcatgaagtattttattatttgggtcaagaggtatctattgaataaactatatgatctgtgtgaatagcgagagttggtctttagcaatctgtaaattgtacttcaaatgcttagcttacacacacacagacacagacacagacacacatgcatgccttttcaaattcctaaaatggcacagctaccctgcttttgcaatcaggaaaataaccttggttcctagttggaaatattttggggaattgtctcagcaaaagattaaaaatatcagggcagcattgtttccctaagccttgtttcttgggtatctttactctctgtctcccaggcctagtgctgcagccaacaaatgctgccaatggcagctgatgacctgaaatatttcctgcagcttaaagctcagccagtgcttgattttattgcgttctgttgcttggtgacacttggaggggccatcagttgtgaggaggatggttaagtggccctgagaaattctgaacctcaacgcagcctcggaggccctcttctgagctatgctctggagaatggactgtaagacagaatgactttttctgcagagacaagaagaaaaggtgggaaggtgagacagagtttctaaagccaactcaagctacagtttagtttggtctcctacataatattcctgtttaagtgggaggtggttggggtggattctttcctttattgaaattataataaaaaaatgtaaatttgatctgaagggaaggccaagtggtaaattctggcactcatggagatcttttagagatcatgaatgtctgggtgttggatcaggatttgaacccaggtcactccatatccacagccgtggagtcattttctctatcactgtttgtacacagcaggcgattataaatattgtaaatactctgccgctggtctccttcctcttcccctcctcctcttccttctgctcagggctccttattcttctcctcctgccttcctctctccatgtcctcctcctcctccttcctcctagtcattctgcgcccccacctcctctcttcctctttcttcttcctctttctccatcctttcctccttctcctccaccgccttctctcttatcatcatcattataaccaccacatagggcatgtctattctgccccagtgttgtgccaagcacttgacctgcaatagctcattaagtcatacagtcggtattattaatatcatccccattttaccacgaggaaatgaacacttggaaacactatgtggaccacctaagtactcacagttagcaaagggctgacatttgaccctagagtttcccaacttaaagccagtgctcttaactccttgatgtctacttatctgtaagtgaatcatgcagaagaaagcacatagttttctccctgggcataggttagctgtcctcaggccttgtgggttttgcaaaattccaaggtcaatattaagtgctctggtatcatttcatatatatgtggattgagttggccttacttctaaaattacaggcaatgttctggttcccactctgagctggtcatccttactgccagcattgtactcagcactgcaggtgcagggggccaggctctgcatattcttggaagccactcctcatgaagctgcttaagtgatgccactagcccccaagacctttgcttgccctgagggcccaagatgtgcttcatctagagtaattctgatttctggaaaagaattgagaccagcctgggcaaaagggtgaaagtttgtctctaccaaaaaaaaaaaaaaaaaaaaaaaaaaaaaaatatatatatatatatatatataaaatatatatatatatataaaatatatatatatatatattttatatatatatatatatataaaagttagccaggcatgctggcacacacctgaggttttatgtccataaaacataaattctggcttttaattggacactataatttttacctcattatatcagtaaaacctccttgaaaaggatttttctttctttttcttttttttttttttttgagacagagtcttgctctgtcgcccaggctggagtgcagtggcgcgatcttggctcactgcgagctccgcctcccggattcgcaccattctcctgcctcagcctccccagtagctgggactacaggcgctcgccaccacgcccagctaatttttttttttttttgtatttttagtagagacggggtttcaccgtgttagccaagatggtcttgatctcctgacctcgtgatctgacctcctcagcctcccaaagtactgggattacaggcgtgagccactgcgcctggcttctttctttttcttttctttttgagacaggatctcactctgttgcccaggttggagtacagtggtgcaatcacggcacactgcagcctcgactttctgggctcaagtgatcctcccaccccagcctcctgagcagctggaacctcaggtgtgtgtccatatgcctggataacttttatatatattttttgtagagacacagttttacccttttgcccaggctggtctcaaactcctgagctcaaatgatcctccgaccttagactcccaaattgttgggattacaggcgtgagccactacacctggccggattttaatttttcttattgaagtaacttgtcatagaatttcctggtgggaagtcccatcaagacatgaaatagacataatgtaaagacatttattgaaaagcaaaaattccatttcccaaagccatgctctatgcatgatggttgggaggcttttaaatagtgggactgagatgaattattctccgatttctgactgtcacaatggttttaatccaagaataaaaccaacacaaacagcgtggctctaaaccaagaaacaagtccattttaaagcaacatctgtaagcttggaaagcacctgttttctctggtgagctgttaaaaatccaaatagttgagcaattacagatggctttccaaagacctgttttcctatttttttctcttccaaaatgattttttaaatatttaacattaacaagtaacagtattggctcatatattagcatgcggctcaactttaagttttattttctcccgaagcttttgtggtgaggtgaagaggcaaactgtggagggttagcctggtaaccatggcaacagcattgccatccatgaagtggctctgagagcccaaggccctcaggctgggaggctaattcctacaacaaagccttttctgtgttcaactgggtacaggaaagccgctggttgtgatggtggctatgacaaaccttcagcctgaagacccgggagggaaaaatgtgagtcttacccttcacacattaattattttatgaatagatgaatgcaatgtgctagcaaacctgatgaatgtaattcaggcctgctctcctaaaccataccgttgcttcattcgacatgctcctgcagaaacacatttaatgctcgtgtgcaaatcatttgaacatggtctttaaatatttctcattctgtgacggtaccaaagctgtctcgagcatctaaaagggattatgaaagccatcctttctacagagtttgttttaaaataacccaactattagaatattatacttccattagttgctggcttagtaggatttcccactcaggaatgaagcgggatttaaagtggcttctcgttcatgaggcatgattttttttcttttttttgttttattatactttaagttttagggtacatgtgcgcaacatgcagatttgttacatgtgtatacatgtgccatgttggtgtgctgcacccattaactcgtcctttacattaggtatatctcctaatgctatccctcccccctccccccaccccacaacaggccctggtatgtgatgttccccttcctgtgtccatgtgttctcattattcaattcccacctatgagagagaacatgtggtgtttggctttttgtccttgcgatagtttgctgagactgatggtttccagcttcatccatgtccctacaaaggacatgaactcatcattttttatggcggcatagtattccatggtgtatatgtgccacattttcttaatctagtctatcattgttggacatttgggttggttccaagtctttgctgttgtgaatagtgccgcaataaacatacgtgtgcatgtgtctttatagcagcatgatttataatcctttgggtatatacccagtaatgggatggctgggtcaaatggtatttctagttctagatccctgaggaatcgccacactgacttccacaatggttgaactagtttacagtcccaccaacagtgtaaaagtgttcctatttctctacatcctctccagcacctgttgtttcctgactttttaatgatcgccattctaactggtgtgagatggtatctcattgtggttttgatttgcatttctctaatggccagtgatgatgagcattttttcatgtgtcttttggctgcataaatgtcttcttttgagaagtgtctgttcatatccttcacccacttgttgatggggttgtttgtctttctaaacttgtttactatggtcacattaggaagggtatttattgccaactgaaaaataaccagtgtgttataaattcaagagaaaatatgttccaaattaacaaaatgggactagaagtattgaacctgaaaaaaggtataattttgaattctagaaaaagagaagtgttcggtttggaaattttagtgacagtaaaaatgtgcctgaattccagttcatttgatttacaacaacatctacattggatgtgacagcggtagaatcctaagcttttcaattagatcttggttttcttattttccagatatgtaattgatatggtttggctctgtgtccccacccaaatctcatcttgaattgtactcccataagtcccacgtgttgtgggagggacctggtgggagataattgaatcatgggggtggtttgccccataatgttctagtggtagtgaataagtctcacgagagctgatggttttataaggagtttccgctttcacttctctctcattctctcttgctgctgccatgtaagatgtgccttttgccttccaccatgattgtgagctctccccagccacgtggaactgtgagtccattaaacctctttctttagtaaattgctcagtctcggtatgtctttatcagcagtgtgaaaacggactaatacagtaattttgggtgaaggattcaacctctttttgggtgattcttcagttctaaaattgagataaaaatagtaccttagaatgttgtgagaattgaatgagaaaatttatgcaatgtacttagcactgtgaccagtcagggttcaacactgttgtatattcctaggtctacctttgatggctcaactatggctaagccaatcaggccatgcacgtattttttggaaagaattactacagtatagaatgtggtgatggaactgtactgtgagagttagcctaactcttgacttgtgcttgaagttcctcaagatgttggtttcaacttctggactgtagctgaagcggctacgttgtctggggtacataccccggggttcattgtcgtgtgccaggaaaatttaggacatggacatgcacgaggagtttaggagccaaagtttaacaggcagaagagaagagaaagagaaacagctctctccatagagaaaggggtctccaagctcaaaggaccggctgttggtgaatgcaccaggttttatagtccactttgaggaggtggtgtctgatttatataaggctcacagattggttcagtgcaatcaggtatgatgtttacatagcacacagggaaggctggttgccccaccctcatcttattatgcaaatgagctttccaggtgatgggcgccatcttgtctgctccttacattacatgtggctgacaaagacaagggaagatggagccgccatcttaaacatgattggcactactgcaggtatctatgtctgcagctcgattttacaggctgctcttggttagaaaggaaagtaattcagggctgcttttcattaaaaagaaaagccttaccaaggactcccatacccttgctatctgcttaagtggtttcttcttaactcctattattgtaatggtcactataggactcactgtgggtgggattggccagccatcctgctttgtatggagcctcctactctgggtatggacaggtatgctttttcctacagctgaggattaggaatgcatgtggaggcgcggtaccctggccgtccttgctggaggtgagcagtgttccttagcagctgcatgcctgggggtctggatagggaaaaggaaacggcaaggagaatcagccacaggcaaagaatttcttccccacctgggccctgtagcctctgggattctctgccagcagggcaccccgtggttcctcaagtcaagactgaaaacagttgaaggtctcactgcatgttctagtgatggcttgtcttttgtttcctaaagtcacgagggtgagactggccaggggcttgtgtggttttatgcctcaggctccagtgcacaggagaaagggcagggttcacctcccagctcttctgcttaatggctgcattaccttgagcaagacttagtgatatggtttgagtctgtggccctgcccaaacctcatgtcaaattgtaatccccaatgttggaggtggggcctggtgggaggtgattggatcgcaggggcctggtgggaggtgattggatcgcaggggcggtcactcatgaagggtttagcaccatccccctagcgctgttcttgggatagagttctcctgagatctggttgttttaaagtgtgtggcacctgcccccttgctctctcttcctcctgctctggccatgtaagaagtgccggcttcccccttgccttccaccatgattgtaagtttcctgaggcctccctagaagctgagcagatgcagccatgcttcctgtacgctgcagaatagtgagccaataaaacctcctttatttatcaattacctaatctcaggtgttcctttatagcagtgtgaaaatggactaatacagttggtgtcatcaagagagctgtggagaatattagtactgaatccacaggggtgatatgaggattctacaaagacacacccgaagtgcctcgcacagcctatggtgcctagaaagtcttcagttcataccgggcataagtggttcctagtgggatttgggggcctctaattgccttaaggcaagtgctgcccctccatcccctactcctgcctgtagctctgaattacatgagttccctgtgggctggcagagttagagctgtgagattctaggctgtagacatcatgtcccccatcctaagggccacatcaattgaagaatcgccctgggcaacatgcttggggaaaacaaccggctgtattgagggtcgttaggttcctgatgacttcagaggtcccagtgataggaccatggcacctctacacagctggctggggctagagaggcatttgccaattcactctgtctctgtctctcttttcttgctcttctctgtgtctctgactctctctctcagtcatgcagcaacaaaagctacagggcaggggcaagtcacaccacactcagaaaacaccgattaaccgtagacatgtgtaatgacaagccaaacaaggttaggagctttgttgaaggggtgaaaaccccaaagtgtgggcatggactatattgggatatcaatcaacagggacttaaggagcaaaacctgcacgtttgcatcaaatgccccctgacctaccaggtaaggcctccccaccccaaacccctttaatgtcagcatcatctttttaaaaagttataaatgtaatacatgttcacggtaaaaaaaaaaaaaatctaaatggcacaaaaaataaaaatctcctttctcctctcattttttccccagtctttagaagtaatcatttaacacaccatgtgcatttgctagataatcgccagagttttctttatcttgtattattcttttggattgactgtttgctttaggtgataaagtgtttctatgatggttcaaataaggttcctgtctccaggttgtttaatccaactgtattagtttcctaggtgacaaaccaccataaactcggtgacttaaaacagcaaaagtgtattctctcacaattctggagggcagaaatctgccattgaggtattggcaaagctgcaaccccactgaaggttctagggaggatcctccctggcctcttccagcttctggtgaccccagttgctcctcagctcatggcagcctcactccagcctgtacctcattcccatacggccttctcctctggtctctgtgtctcctaatctcctcttacaaggacatcagcgatagagttggtgtccaccagcccaccctaaaacttggacatctcatctcaagatctttaacttaattgtatttgcattgaccttgtttccccaataaggtcacgttctgattccaggtggacttgaattttggggagacattattcaatcactacaaagttcactctgtctccggctctcttttcctgcccctcttggctaaggcaaatgatcttaaaactttaagtagatgttgactcattttcaatactctgacaatttgggagcggccagcagccagcgcagagtccccatcattgagactgaaatttgaaatagtgctacaagctccttgagccactttgagaggaaacttaccaccaacaaaacttcccccaaaatgatgatgcaaaatcaataaagatctcgatcaaagattcttggtaacttcccaaagataagcagatccttaattggctgtgagatcttagccaaaagtctcaaagtcttcatctataaaatgatgatggcaacgtcatctattattggtgttgtgtgaattaaatgaggaaatgcatttggagtgtttggtgcagtacttggaatgtagtgaatgcttaatcaaggatgactttgaaaatcttaagaactgagaacagacttcagcacagcatatataatgaacatgactggggatataagtggttctttaaaaagatggcatgaaataagcctgtatcagggcccaagaatagaagcagacatagctggatcttatcataatgacagggcaccagaatcagtgtcccagcaggcaggaaaagcacactcaaattagggaaacccaagaaaggcttaataaaggcaccaggtacaaaggtgtagggaaaccaccagggttgtgtggtaacagggagagggagagtggtggaacagctgttaccatccctaaaaccaaagggatggaagagaggaagtgagcaaagggacagggaaggagagagtctctagagaaggtgcctcaatgcggcagtgaccacagccaccctgcaggatatggtcaagggaataaagccgaaattttactgttcttcctccttccaatcccctgctggggctcccctttgctgagttaattttgaaatcatagagcaagggaacttctggatccctagggatatgagtgtggtcaacccagcccccaagaaagcaaacttcctagggcagaagaaaaggtgcagacgctgggagaatcttggggaggaacctggaaagataccgcctgcggctcttaatcatttgattgtcagattgtggaacattctcttctgtaggtggcactgctcttgcaagacaaggaacccgtggctcagcaccacctgccataactgcacactggcacagcttctagcaatacccaccaagcgtccactgaggaacttacggtatttgccaactttggcaaaggataagataatgttgtggaaaataccatactctgcggcagttttaggtatggctgcagacactgccacatcccgagacagatcgccctgagctcttctaataagagacaactgctgggctactgtctggtgaataatcgaaattgcctgttgccagggcatgtgacccactgtgactctcctggagagcagcaatcaagactaaagtattagttcctggagctgcaggagacattcagagtggcatctgttctcactggttggcagcagaattggttcatttcagcctgcaatcctcttccagtaaatcctcttccagtaaatcctcttctccacccccatttacctataagacctcctcctccctctccacttcctccctctccctctttcccttcccctttccctccctcctttttctcttcccttcttctctctctctctttctctgcctccctctctccttccctctcccaccttcctccttccttctctctctttcctccctctttcccctctccctccttcctcgttccctccctccctctctcccttatccctccctctccatctctctctctcattcctgcttggacatcaggttcagagggctgatctggtcacactcctcgcttcttggcacattttcagtgtggcttcttgcaaggactctcacttgtttggttctttaatttccttttataacagcaacagcaattacccaacccttccaatgtcactttcagaccagatgctgtaccaagggctttatgtacactcactgtttgctccccacttgcaagtgttgagatggattccaccacggcctccagctggaggagcttggtaagttgcatgtggtgtcagggctaagcccaggcagtctgttcctttgatttgggctctgcactgtcccccttcccctccccttaggtttaatggatatcattttgttatgtgttcctacaaaacggatatcattgttttgtagtcatttaaaaaacagtcaagaaattattgttgtaaatgtctctgtttcttattttctctaggccttcgcttcccttggtggccaggtactttctggttcccccagaggaaatcatttcacccatcctttcttccagtggtggacccagagtgcttccagctctctgtcctacaaataaagctgtgacaaatattctcaaatatgtctccacaaggggccgtggggacatttccatggcctggaatcagaaatgccaggccctggggtgctgaggcctaattggtgagctaggcccgactgtgcccagcctcccctcccaccagtgggcacagttccagtgtccttccatccatgccagcacttggcatcagctgctgaatttgtgccaggctaataggtgtaaagtgattttccatggtattaatttgcatttctctgactattgatgatggccaacatttcccccaatgcaggcggcctttcatctggctgcattgcagtaaactgcttgtactcattttactattagagctgctggaattttcttgttggtttgtggggttttttgttctacatttctgtttttttatctggtagattttatctgctgcagaatcttctccctgtctgtcctgtatttatttttgtccctggggtgaccatttggaacaaaactccttcattttcatataatcaaatgtattaatatttctgtacattggaagttttaagaagtcctaccctatctacaaatcataaagatattctcttatatgtctttctgttatcctcacccttttaccttcctcaggcaggtattgctttcatctggagcgcatgatgatttctgtgttaggtagagattcagtcatatttcgattgactgatacagtcatggtctctccagcactatgtactaaccattgtcctcttttccttattgagttttgttcccctttactatatgttaaatccttttcagacacaggtttcactctgtactctctattctgtctccttgatatagtttctactttgtgcagcttgcatgctgtcttttcattaccttaactttgagatgtgttttaatgcctagcagaacaagcctacttcattttgctttttttttttttctttttctttttgaaacagggccttgctctgtccccaaggctggagtgcagtggtgtaatcatgactcactgcagcctcaatctctggacctcaagggatttttctcaactcaacctcccaagtagctgggaccacaggtgtgcaccaccatgcccggctaatttttgtatatgtatgtgtgtgtgtgtgtgtgtgtgtgtgtgtgtgtgtgtgtgtgtgtatgtgtgtgtgtatatatatattttggagatggggttttgccatgttgtccaggctggtccttaactcctgggctcaagtcatccaccaggctgggccttccaaagtgctgggattacaggtgtgagccacctgtgcctggtctcacttggctcttggcttttaaaaagttgacatagctttttttttctttttttttttgagacaggatctcgctctgttgcccaggctggagtgcagtggcacgatctcggctcactgcaacctccacctcctgagttcaagtgattctcctggctcagcctcctgagtagctgggattacaggcacacgccaccatatcaggctgatttttatatttttagtcgagatggtgtttcaccatgttggccaggctggtcttgaactcctgatctcaggtgatctgcccgccttggcctcccaaagtgctggggttacaagcatgagccaccacaccggcccaacccagctcttcatagacctttcttcttccatgttaaaattaaaataagtttactgagtttctcaaaacacctgcctgtaattttatttcaactggattgcgtttatatcttaatgtagggagaatgatgtctttattctggttttcacccatctaagtggcatcttttgaggattcctgacattttcacgtctattaacaaggatgtagaatgtaccctgagtgcttgaagtaaagcgttcctatgcctagcagggagtgcacctctgctggtctcctaccttccaccaagaaggatttcaatgaggctctggagagaggcatggtggctggggggaaggcctcccttggcaggggtttgagggaatccggatcccctcccgggccccagcacccagtgtcaacacacgcactggccctgtgtccactacggcttgcctctgcgtgactctcacttacatacatgtcaatcaccacggatgccctggaattctaggtggttcctcatcgcttccttccggatccccacagtgtctgagtatccccaatatctgctgcatttctcattcctgcccaaacccttgggcctttccactgttccttctagaaaacactctgctggacctggaggtgaggcaggggtccctcctgcttcttcttgtcccttctggacctctctaaatgcctcagctttgcctcatctcatcagatcgcatccccctctcccccggctgcagccatctgcagactgctcacttctcagtgattggggcttctggttccctgtcactctctccatcaccactccagccttaattctgcatgatttcagtccatgtggttgattcttccaacaaggaaccttccagttccccgaatctctctcttaatgattgtgtcatatacacatcccctcctgcctgcaacccaagtgcctcactcttatggttcattataccttagacctgtgctgtccaatatggtagccactaaccactagtggctatatacatttaaattagttacaatcaagaataagtaaacatttgatttcttagttgcattagccacatttcaagtgcctgtggctagcagctaccgtgttggctagtgcagatattggacacttccatcatcacagatagttctattggaactttctagcattgccctgggctttgtcattaccagtcagtataatgtctccataatcctagctggacatctccactccctgcccaccacctcctggccttgccgctcttctccatctactgcctgaactctgccaaaccttggacccttcagcaacctgcacacaactcatggacccctttccactgtccttcccctgtgggccctgcagcctgtcctcattcctcctcacttagttaaatgtcctgggcacacatgatagtcacttgctgccatgtttccagttccctgttgctgctcgctttattgcacttgttattttattgctcttgcttgctcaggctgtggtgcggatgcactgcaatttgccgactgcaatttgctatgtgctcctcgttcatgccgatttaacagaatggggctagagaaaaacacaactgcacccaccggtcccacttacacgaatgaccgatatcatcaagtgggcacccgcactcggctgcaagtctgcagtgctgtgtattgccggcgcactggcttttccattctcctaggtgaagatgccaagaggttctcctcttcttggattcccaccatcctctccttcttcctgtctcagctggtgatcttgcttcgttcttcactaaagacatgaaagagaacgtttccaaactcccactgcacctacccacccacctgtgtctgcatttatatcctccacgttcccttctgctgccatagagatgaactgcccaagctcctagagcggggaagttctcctgcttgtgcctaggacctgtcccctgttgcctattgaaaggtgtgctgcggcgtgagactcccctccctctcctacatcatcatttctatctctttcctggctcataagtgcacaaacatgctttcatttcttccaccttaaaaaaaaatcttctgttgatcccactctcctcctcagctattgcctatttctctgctcccttttacagaaaacctctgagagaattgtccatatttccggttcctagttcctctcctcttgttttattttattaaggaaaatgtttgtttcagaatgatctcagatttatggaaatgttgcaaaggtgatattctcatttgaaattactgtaatcaggttttctcacgcctctccccaaactgctcttgtcactgtcatcgataagctccccttcaccaagctgcagtgaggaaaccttagccttcggcttcctgaagccatcagcagcgcctggtgtggctcactctccttcctctgcctgcttcctggccttccgtggtctaccactccaggtttccctcctgcctctccagctgctttctgttttttttttttttttctcctttgctctcctgcctgggtccctgtcctgggacctcttctcttctctgcctacacctgctccctgtcttccaagctcatggctgtggatacaaattacacgcacatgactcacacatttgcatctccacttcacttcccacctggactccagacgccttgatccagcttgcagcccgacctctctgctgggatggctgctacacacacaacgcatccaggacggaacctgtggtctccctcccgacctgctctctccacttcagtggcagctctacttctgtagctgctcaggccaaaaacactgaaagtccccctggacgcctctctttttctcacacctcatagcgaattaatcaggaaatgccgttgagtggccctccaaaatacttccagaatctgactgcctcttcctgtcttccctgctgcttctgtgggccaagcctctttgctcttcctagatattttcagtaccttctcattgctttcccatcttcccttacactctatctggaatgattttttttttttttttgacatggagtatcgcttttttgcccaggctggagtgcaatcgtgcaattttggctcactgcaacctctgcctccccggttcaagcgattcttgtgcctcagcctcccaagtaggtgggataacaggctcgcgccactgtgcctggctaatttttgtatttttagtagagataggggttcaccatgttggccagactggtctcaaactcctggcctcaagtgatctgcccgtcttggcctcccaaagtgctgggattataggcgtgagccactgtgcctgtgctggaatgagttttaaaaatgtcaatcagaacgcatcattcctttgtccagtggctcctcatttctctacacatcgtctcctacagctcctgctcattcaccctgctccacccacgctggccttggctttggtccttgaatatgccaggcacatttccaccccagaccccctgccctggctacttcctctgcctagaacactcttccctgatgtatccccgtgcctcactctgctttctcattcaagtctttgctcaattatcaacctctctacgaggcctactttggcaacccccttcaatctgagaccccctctccagcatccctaaacccgttctattgcacccatgaaacttacattcttatactaccctatagaatttatttcttatattgactttttattttctctctcccactagcatttaaacttctgctcattctaacagggaaggaaaaagcaatcagagatttaggaattgggaagcaagtgacaaatctaccattttctgtaccttctaagaaacacaaacagaatcaagggacaaagctcttgaactaatgagtgggttcagaaagaacgagcttacccaggctggactcagtggctcacatctgcaatccaagcacttggggaggccgaggcaggagaattgcttgagcccaggggttcgagaccagcctggacaacatggtgaaaccctgtatctactaaaaatatgaaaaattagctgggcatcgtgacgtgcatctgtggtcccagctatacaggagactgaggtaggaggatcacctgagcctgggaggtccaggctgcaatgagccatgaccttatactacgttcttatactaccttatagaatttatttcttatatttactttttattttctctctcccactagcatctgaacttcacgggagcagagattggtttgttattttgctctaccttttgactccagtacagtgcatggcactgagcaggtatgcaaccatttttgttgcatgagcgaatgtgtcctgtacagagttttaattaatgttttttttttttttccacagacagcctgtaaattcttggctatattaatatcttgatacttagagttttagttcttttttagtggcatcttatttttgacaacgttttctagttgcaatgtcattgcatttttgcagggtaaactcatttcttttgctgttgttgttgtttttgttgagacagggtctcgctttgttgcccaggttggagtgcagtggcgtgatcatggctcactgcagcctcgatctcccaggatcgggtgatcctcctatctcagtctcctgtgtagctggggtcatagatgcacgccaccatgcccagccaattttttgtatttttagtagagacagggtttcatcatgttgtccaggctggtctcgaacccctgcgctcaagcaattctcctgcctcggcctccccaagtgcttggattgcagatgtgagccactgagtccagcctgggtaagctcgtttctggcgctctttctgaacccactcattagttcaagagatttgtcccctgattctgtttgtatttcttagaaggtacagaaaatgacagatttgttgcttccttcccaattcctatatctggggttgctgtttccttccttgttagaatgagcagaagtggtatcatggacatccttgtcttatcctgattttaaagtgcttctagcatctctcccttgatgtttgctgtaacattttggtatacaagctttatgaagtttaagaaactgatttctattccagagaccttttaaattataaaatatacactgaaacttgtcaaatactttgtcattcctgattgaaatggtcatgagattgtacgtacttttagtctatgaatgttgtaaattacattgacagatttttctttgttttcctagaataaactctatttggtcacattgtatttttcaaaagtacatagagttagatttagctagctaatattttatttagaatttttgctaaataaatgatttagtaaaataaagaacaaaatgagtttgcaaatatagatgtgtgtgtgtgtgtgtgtgtgtgtgtgtgtgtgtgtgtaattcgcattgttgttttctggttttagaattaagattacattatctctcttaaagtgagtgtgtccgatttattttgctcttttaatattttgtgaacatcttagattaagacaagataacttaggaattaatggtttcttgaatgtttgggagatctaacaaggaaaattgtcagagactggaggtcttttggtagcagagatctttgaccactacatcagtttctctaacatttactctgtatttgtctttttttcctggtgccaggtttggtatttgtgtatctttctcccctgctgcaccccaagtgaacctttcccatcctgggcaggcacagctcccctgctgcaccccaagtgtcttcaaaagcaattgcaaaaaactgaaaatagacaggtgggacttgattatactaaggagcttctgtaaaagcaaaataaactatcagcagagtaaacagccaattttcctagaaatagatcctttctaacctaggtccccagatttattagtatatgggtgttcttacactatttcaaatctcattttgcctgtagttatgtcccctttttattttatattatatttatttatatattttctctctcattctcttggtctttctcttcttcactattttgatgattcttgccaaaaatatgtcttcttaatttttgtaggtctgggaatcagattctgagcctctgagctttgcatgctggggacttattgaagaatattttcttttgaggggtgagaggaatatgattgggtggagggggaaggtaaactgtgattgagttgcccttggttgaacgcaggccatcagtggatcctgctaggagccctggagctaggatggcccttgagagccatcccactgaggcaagggggctgagcctttgtccccactccacccgcttcatcagatgcaggcggtcccagcaaaaccttaggaaaggcagcttcctttgccaagggcaattcctggacggctcaatgctgaaaagggtagggtagggaacccaggaagtacgcgacagcatctactatctcacattcctggagcatctactccagatcgactcagatctactcccttcacagagcaatgtgctttcaaaggtgtgctgaaaccagcttgtaacagattgtgacagcagattgttagacttttcaggaattttgcaggacagttgttaagccattggtagcttgaaataggctatggaggaaatttttacaccatggtaattggcaaatgctccaagttagtatcttttcccccttttttctaacagatgatgtagcagcacataatcatgcttaattaaacagctgcaccagcattctggctaatctttcctagggaaactcaggagagccctatagtcctgtagtctttattgctaaactcgtctcaaagtcacagcgcacactcatcttctccctctacccttacacgttctgtattccccgcccttggctgagtagcacttctggtctaagtggctgacctcatgggggtgacctagaccctcatccctaaggagtctgaacacctggctaccatgttaacacagaactacacttggacatttgttgtcaagattgggcaggggtgtaacaaaagacacgcagtggatcacctgggtgccaatgtaatcttccctactgccactcatgacagtagtcttacccaccccaacgagcagggtcaatggcccctgctgggagggaaatactttcctgtctggttggtctcttgtcacaagaagcttaaagagagtgggcaaaaaccacaatgggactcttactgtgtgccctggaagaagcattccctctctgtcaactaggaccttatacccacagcacctggagtgtgtgggcacgagaagtacaaatttcccaagcagatcgcggagagtaatggggagcagggccactctgtcctcccccttttgttcttgtgaccgcttattggagacaaaccaccatatgatggtccttcatgaagggtttaggctgcctcctggaggatggtggttcatctttgcaggttatcacctccaagctgatgcctcagttgcatcttcaaacggtgattccaagccttcactaaattagcagcttccatgtgtagtgttatatgataggaccaagggattgcatgctcaggtatacactgctacacttcttttattgtaaagtgggtctcttgacccacaatatgcaatgttatgtaggctgtttagttggtggataaaaaagtgtgtgtgtgtgtgtgtgtgtgtgtgtgtgtgtgtgtgtatagttttataaattttatcagactgtgatgccggctaagctttctaggcaagaaaggcaaaaccatactcagaaaatgtgttggtttccattaagatgcattgctgcatcagaaaggggtctgatgtaattaacttgcaaagacgtgtcttgttagtcttctccagggatgattgtatcttggaggctcagaggtagtctctgttgcttgcaaattggacattgggtagtagcagtagttagatcagctggtgaataggagcccatgcgtttggactcatgcgtaacctccacccttgccattatgactcctttgttcaggagcctgctagtgtggctggtgacagaggctggctacagtaactggccaggtcattctgcccacttggttgtttagtgcccttttcatggtgaattctctccctggggcattgacatgggattgaaagatctcccttatgtccattcacttgcttcttccaaattctcttttccaggctccgaatcaagcagctaagatatgtggtattgagtctaggtctaggcttattttgggtcattcatctctgtcatttgcttggaatgtatagtattttcaattgatctaaatattgaaacattgaccaaaaatcattttaaaatttaaaaagagtaaatgaaaatttctgcatttagttttctttccctgactgcatgtgctatgcttatgagaaagaactggagacttaactgacaataagttaaaaatgggacaaaacataaggcaacggaaatgctcaggccacattgatagaaaaactgtgtcacatcgtttccttcgttgcctgggtgggccgacagcacttagagtgtacatccatttatgggggtgacatattttccaaagggatgcccagattagaccaagcccaggactggttacaggaatgagaaacaattaactgaggaggagagaagtttggggtgaacttgttgccagaataaagtgatgcattagtgctggcccatgaatcaaccgcatccaaatctgtggaggaaattctaaaaaatcccaatttctaggatgaaacctaagatcgtgcacagctcgaagaatctattataagataagggagttgtgtttttacaggctaccatgaagaatcaggtacaatcctggggagcatgtcgtagtccatttgggctgctataacaagaacagaataccataaccggggtggcttataaacaacagacatttatttctcaccgttctagaagttgagaaatccaagatcaaggtgccagcagacttggtgtctggtatagacctgcttcctgtccataaagggcaccttctcctctgtgtcctcacattatggaaggagcaaggcagctttctgggacctctttaaaaaggacactaatctcattcatcagagcaccctccccatgaccctaatgacctcccaatggtcccacctcctaataccatcgcactggcagttaggatttcaacacatgaactttgggggagggacctaaacattcacaccatagcggaacattaccacagaagaataaactgggacccatgtagaacaggtgtaggggtagagtgattcaagtaaaaaaacccaaaccaagtaaataaccaggtgtagccatgagtggaacaggcttcctcctgctgtggaaagctctgtgtcgttagaagtatttaggcaaagtttgggttgtggggattctattaaaaagaattccagctttgggagggaagttaatttggaaaagctcaaaggttctttcatttattcaacatatatttgctgagcacaaactatatggcaaaggttatagggctgaagaagacaagtccctgccctctaggagctcacattctgatagagtgatttcaacaaagtccagatttaaagaatgtcaaaatagaagaaggagaatcctaaggcatgtattagggaaaaattccacttagaaataaatgtattcctatgttcctagcaaggagttaactggaaaaaaaaggaaataggaaaaattgattttaagtgtgaatataggcattggaaaattggcagtatatgaagtgttatcaagtgttctgaatacacacacacacacacacacacacacacacatatatatatattatataaatttagcattgttatatttaatagaatgaaatcatggtgcttaattagcccacaaatggaagagaataacagtttggcagtcctacaagggaaacatatgggcatatttcctctcttactcactggccttggtaaggtgttggtgcaggcagttaagcttttgagaaaaggatgctgactcaggaaagtttttgagctttccttgagcttcagtaagaggaaatttaaatttgaacattcccttgcttccatgattagcttagaagtcataataagaataatgtcattgtattaaatgtattcaaattctgtggtttaaaaaagtagcttaagtctctaaagagttctttggtattctttttgaatttaatgttaaattttaaaaacttaaaaaatacacagattaggacttctatttttatcaatgatgtaatccacataccccaaaactgttatttttttatagcaaaacaatagttttgccatagaaaacaaaacaaaacaaaacaactagaaataatagataaaatacaaccaagtttcttctaaaggaaagttccacttgcaagaaagtgagggacacctttaggccaaaacagagcaggacctaagaaacagagcagtcagagaggaatgatgctgctattgccttgggagatttgctcatcttcctaaccaaggggtttagattttaatacccatgctgggaaaggagcatcgtgttgggacagcttatggtagaaacctggaactgaaaacatttatatcaggtcaggacccacagattgctgcatcttctataaaagggcagattagaagaataatctgcccaccagggcaagtgacaaggaagcatgtctgctgtggctcaggctttgggtgttcacctgccttcaggtaggggtggggcttgcatttgctctacctgcagagtctgacagccaccaacccatccagctgagcaacgaaccgaggtggtctaggctgataatttccctgggtgtctagcagaaacaaacagctttgtggggacacactcttaaatgagaccacacagcataattacagagagagctccactgagatgagctcacagttagaaatggcagaatgaattcaccatgcaggaatgtcagcaggcacatcagcacaggataggactttcaagatattcaggtgaaagaatacttgttacacaccatgaaatacttattttaaaatcattaaggacattagaaggaatgaaaaaagaaaaaagacacaaaaaaggccagaagaattgcaaagaaatcaaatagaacttctataaatgaagaaagctattgaaattaaaacctaaatggagcaaagagccaaataaatgaaataaaaattagatgtgaagaaattatctagaagatgagagagagaatataaaggcaaggtcaatagaatggaagatagaaagagatcccaacagttgtgtaacagaatttccagagagagataatagaagaaatagaggtaatattcaaagaaataatggctgagcatttcctaatttccgtgaaggaaatgaaaccttagattcaggaagcacaatgagacctaagcagcataaatttaaaaaaacaaatcaacatctagacacacagcaatgaaaccacaaaacaccaaaaacaaaggtcctacctaaaagtaatgaggagcaaagtcaggttaaatgcaagagacacaggacgtttggcaccatcagacttcccaacagaaacattaaaagtcagaagacaataaagtaataataaaaataatagtcagccttatttaaggaattgtgttctaagtgctttacacttattatctcatttaatttttacagtaaccctataagatgtgagctaatattattcttatgtttccaatgagaaaactgaggcacagagactttgagtcatttgctaaggtcggatagctcctaattggcaaagtcacgatgggatcccagggattctgaggatgaagcctgtgtttaataactgttatgccaagtgagcattttcaaatatatgagagaaattactatcaatctagaattctagagccagctagcgatcattgaagagtgagtgcaacatgaatggaaagtagtagaccctcaatgaaaaagaccactaaaagacaaaagcacagactatataaaataaaaataatgaagactagttttgggctataaatgaggtaagatgcaatgcaggacaataatgccatgtgacctggggaagggtgaccggagtccacattgtgatgtttttgcattgctcaggaggatgagagagattggactaactttggactttgtatatgtctatagacatatgcctagtctaattttaaaggatactagcaaaaggatatgtcggaaacaagtactcagcgtagccaaaagaaacctgcacttagacagaaaatttctcagcaaggtacctttacttctgcagaagggtgctgcttgcgcctgttacaatcgcaaaagcacactgaacaaaggaggaaaggagtttttaatcctaacgcagttcctgtttctgtgtccttctcctgttggctggggttggaccacacaatctaagctaatcctgattggctaagacttaaactttttccaaaaagggtaaatgtgctatttgcatttgaagaagaaagggggtaggattgatttacaacttatacagcttatgaccagaaagttgagtctttgaagaggaacttcgttgccccaacagatagaaagagaaaataatttccaaactaatctagggaaaaataggaatagaggaaagttgatttatctgataattattttgatataagtattcagagttgtatttattttcttttcctaggttttcatttttgggtgtgaatttacatgtgacctgcatgttgagaggaaggatgctaactttcattgagcgcctactctgtgcctgctgttttgcatatgttattggagtcaatcttcacagtaaacctgtaagggaattagtattattccctgtttacagataaagaaaccaaggctcagagagttacataacctgctcacaatcatagagcttttgtgaaccagaaaataacttcaaaatcagttgtctgactcaaagtccaggatatttctccactttactagaatttccaaacccctgaggagcagagagctctgaaaaggggctctggaatcccagtgtgccctcaaccgtgggagtatcctggataaagaatctctgtgttccattttttgtgtaaatgtgtggaaaggcccttgtgaaacagaaagtgcaaattcctttaaaatctaggtggtctttcgtcagtgtttgtcttctcaggcagcagatgttattatgtgaagggatccaggacctctttttttatgtaaagaaaaaaaaaaagcaagcagtcttcttactaaatacatgggaatccctgaacttggcttttcacccaagacccataaaaaccccagggcatttgcagtgtaaggggtgctttccgcatggttctgactccactgtcagaagggcacgtctccacttctgcctccttcctaagagatgccagatactctatctgatatggcttggatttgtgtccccaccgcaatcttatgttcagttataatccccagtgttggaggcgggtcctgatgggaggtgattggatcatgggggcgttttgaaaccgcctttgcgaaattataactgaggaaattatgacagtgaaagagatcagacctaaccgactctaccttgcttctaacttttaagctgtccttgttcattcctgggtataggctgaactaactttgggacggaattcagttcatcgtttgactcgaaaacaaaatcgataacagccctttccctttttgcctgggaactagtctgcctttgcaggactaacaaattagctacaagattagaaattgcaatttaagggttatgcagcctctggctccaagagtttgaacctcaccaaattgctcctggggataacatcactattgtgaaacctacgatcagggcttgagatactttgcagatcctgcccttggtgggtcagctgacaccacccagaccagtcatctggcccaaccagttctgccgtcgcacccaggaacagaggacattaagaaaactccctctgattctacctccggcctgaccaatcagcacttctcacttcccaagcccctctccgccaaattatctttaaaaactctgatccccgagacggatttaagtaatcataaaactccggtctcccgcacagccggctctgagtgaattactctttcgccactgccgttcccctgtcttgataaattggctcttgtctgggcagcgggaaaggtgaactcattgggtggttacagttttctcatgaatggtttagtgccatcgcccttggttgtgacaatgagcgagttattgtgagatctggttatttaaaagtgtgcggtagctcccccttctctctcttctacctgctctggtcatgtaaaacgtgcacctgcttcttgctctccttctgccatgactgaaaatttcctgaggtctccccagaagctgtcaagcttcctgtacagcctgctgagccatgagccaattaaacctcttttctttataaattacccagtctcggtatttctttatagcaacatgagaatggactaaaacactgctcttttcggttttaaccctatatgccgtgactgatcttaagattttagttaccaatgaaggattcaaataaatctctacctatggcttcacatcttccgctcgggatttcagcctatcctgcactcattcattcatccatccatcacttgttgaaggccactgtgtgccagtcctgtttctcagtgaacctgcacatgaccctttggtccaaggctgtcggaggggcttacctgaggttatgagattgtaaacagaagggcgtcatctttagattcattttatagggcttctcccactttactagtattcatttttattatctcctctctgtccttgacaaatctacatgttatctaaattgatatggtacaatacttcctgcactttatcaagggagggttgcagtttgcttttctgtaacttttttttttccttgaggtgtttgagctgtggtgtgtctggccaagcactgccatggattaaatcagtcctgggaccaagcaggtgggattcccagacattgccaaagggaaggacagctcaggctggtttcttgccctggcaggaccatagctgtggggacattggtgagggtgcaggttctggaactgactcttgggggatctggaaggacagccaactcagctgagtgtagcctgaaggcctgtgtcctagggaagcctgttggatgaatggatttgagtcagaacagggccatgttgtcatctttagacctgaaggctgtccagggagcgagccgatctgagcagaaatgggctctacttggcctagttttgccagtgcagtcctagctgctgcctgctgcctctatgtcctgcctcactgagtgtgctttctttaacatggagttgattttgaaagacttagcaataagctgttccttttttttctgatgctttttaaatgacaacataaatgcaaggtgggcaagtgggcctagggacagttacctaactcttgggaggaggtggcagaggtatttgatgctactgcccctgctggctacttagtgtcctggccagtggggcaaggtctaggccaagagctatgaacagatccctacaccaccaacaggtgggagtccctggaaatggggatattgtgggttaagtctatgagaaatgtgtgtgggtagatatgaggctgtcctgccaaggggcctgtagagagcagtcgggatgccctggctactctggttttgtcatttattatacgacattggcaacgcaggtggtaacctttgatgtggtcacttagtaaagccatactttaaagaaatggcaaattctccatctttaggtaactttgtaactaatcacagggcagctcaagggtgttcggaaatgagacagtctatcacataggtgtgctggcagaataatggccctgcaaagaggtccacgtcttcatccctggaacctgtgactatgttaggtcacatggaaaggcagattgaaattgcagatggaattaggtttggtaatcaactaacgttaaattagggaggttatcttggattatctaggtaggccaattagaatcatgagggtttttaaaagtggaggagggaggcagaaggaccagaacgatgacagtgtagggaggactcaactggctgttgctggctttgaagatgcaggagggggtcaaaagccaaggcatgagggtggtctccggaagccagaaacggcaagaaaatgaattctcccctagagcgtccagaaaggaaagtagccctgctgctgtcttgattttagccccatgagaccatgagacacttctgccctccagaactataagataataaatttgtgttgttttaagccactgaatttgtggtcatttgtcaccgcagccacaggacactaatacattaatacagtagacaagagcgtgaactcagaaatcagacaggcctgggtttgcatcttggttttgtcttaaccagctgcttattcttgggtaaaaaaaacagaacttctctcaagttccaaggaacatataatattttctctattttacaacttttatgagagttaaatggggaaatgtacatgtcagagaacaaataaacaattacaaaacagagtcagttaagagtcagttaccgtcatgtgccacataacatttctgtcaatgacagaatgcatgtacaacagtgtcccatcagattataatatatttttgtgtgccttttgtgagttaggatatgtttagataaacaaatacttaccattgcattacaattgcctacagtattcagtagagtaacatgctgcacatgtttgtagcctaggtgtgtagctagttgtgtcatcgagtagcccatagcaataggctgtaccatctactccaggtgtgtagtatgctatgcagtaggctatgtcacttatgatgttcacacaatgatgaaattgcctaagaacgcatttctcaaaatgtatcccttttggtaagcgacgcatgactgtatttgctagtgggaaaggtcagggttttttaactgctagaaatgaggagttcatggtgattatgatagttaagccttaaaaactgccttctacacaggatgggatgagtccgtaaatgttcccagtctgtcaaaagaagactagttgttcgctgtcaggaaacaacaggcagttttgatgattcaaatgatgctataaatggaaattcaactcttcgaatccctccttttgggaaggcaaatgatcacattttcaggttggcactatcatcttggtttcagtttgtcatggaattagaatggtcagtaagaaataaaagcctcatgactaaacaatggtaagcaaattaaatgtaaaccatattactatttagagttattgtaataataaatagtatcagaataaagaaaaatatcctcctttaaggtataatatatgtaaatttataggaatattataaataatcactttagagtagaaacttattatagacagagcattgacagacctccagtgttctattttaaaacataaagtgaattataattatccccaaaagagaaggatagttaaacgtaggaacaaaatctctcttacaacaagtgaattggtagactattaacatatcagtttttgtgcgtgaaaatatgtatccttcttcttaacctgaaaagtgtgtattcacaaagacatagctatgttaacaatatattgcttctatataattaagctaggaagattaaatttctcttttaattagttaggattttctcccttcccttcccttcccttcccttcccttcccttcccttcccttcccttcccttcccttcccttcccttcccttcccttcccttcccttcccttcccttcccttcccttcccttcccttcccttcccttcccttcccttcccttcccttcccttcccttcccttcccttcccttcccttcccttcccttcccttcccttcccttcccttcccttcccttcccttcccttcccttcccttcccttcccttcccttcccttcccttcccttcccttcccttcccttcccttcccttcccttccctttttttttttgacagagtctcactctgtggccaggctggagtgcagtggcacgatcttggctcactgcaacctctgcctcccgggttcaagccattctcctgcttcagcctcctgagtacctgggactacagatgcgtgccaccatgcccagctgatgttttggatttttagtacagacggggtttcaccatgttggccaggatggtcttgatctcttgaccttgtgatctgcccacctcggcctcccaaagtgctgagattacaggcgtgagccaccgcgcccagccaggattttcttatatcctgagtttgataagcagaagagctctcaagatagttttgcttaatcaaaatctggagaatgccaaataaactcaattatttttgttatttttccttttacacgatgaagtagccaatatacacatgtattagtggctacttaggaaaccccaaagacattttaggtgtaaaagacatcttagtttatgattctaaatttggagactaaatttgggcaaaaacaatattaaaatgattagtcaggatagattggtcacagaataagaaatagttgttatattggtgtccacattagcatgagtgaaaatacacatttaaaaattagcatgatgaaagttaacataataataattaagaattgtaattctttctaaagatgcgtctgtattgcctcatctaacataacctaagacacatacttctggtgctggccaatatgagttaagcccagtatagctcatttctaccacagattacaactaataactccaggcaaacacaaaaagcaaatacctgatgctacccaaagcaatctacagattcaattcaatcactgtcaatatactaatgatattcttcacagaaatagaaaaaacaaccctaaaatttacatgagaccacaaaagaccccaaatagctaaagtaacattgagccaaaagaataaagctggaggcctcacactacctgacttcataatatactacaaagcaatagtaataaaaacaacatggtatcagtataaaaacagacacattgaccaatggaacagaatagaggacccagagataaatccatgtatctatagccaactgatttccgacacagacatcaagaacatacattgaggaaaggatgtattcttcaataatggtgctgggaaagctgaatagccatatgaaaaagaatgaaactagacccctatctctcaccatataaaaaatcaactcaaaatagattgaagatttaagcataaaaccagaaatgataaaactactagaagaaaacagcagaaatacttcaggacacgagtctaggcaaagattttatgggtaagacttcaaaagcacaggcaacaaaatgaaaaataggcaaatgggactatataaaaccaaaaagcttctgcacagcaaagaaaacaatcaacagagtgacgagatgacctgttgaatgggggaaaatatttgtaaactattcatctgggaaggaactaatttccagaatatacaagaaactcaaacaactcaacagcagaaaaacaaataatctgattaaagaatgggcaaaagatctgaataaacatttctcaaaagaagatgtagaaatgccaacaacatatgaaaacatgctcaacattagcaatcattagggaaatgcaaatcaaaaccataatgagctatcatctcaccccagttacaatagctgtcatcaaaaagacaaaaaataacagatgctggcaagggtcagcagaaaagggaactcatatactactggtgggatgcaaattagtatagtcactatggaaaacagtatagaggtatctcaaaaaactagaaagagaactgccatatgatctagcaatcccactaccagatatttacccaaaggaaaagatctcagtatgtcaaagggtacctgcacttccatttattgcaatgctatttacaatagcaaatatatgaaatcaacctaaggcttcaccaatggaagaatggataaaggaaatctggcatatatatggtatatggtgtatatatatatgtgtgtatatatatatgtgtgtatgtgtgtatgtgtatatatatactattcatcaattaaaaagaatgaaatcatgtcatttgcagcaacatggatggaactggaggtcattatattaagtgaaataagccaggcacagaaagacaaactttgtatgttctcactcatttgtgggaactaaaaaaaattaagctcataaaagcagagagtagaattttagttatcagaggataagaagggtaggaggtaagggatgatagggagaggttggctaatgatataaagttacagctacatgggaagaataagttctagttttctgcagcactgtaggatgaacatggttaacagtaagttttgtctaaaaaagctggaagagagggttttgaatgttcaccacacaaatacatgataaatctttgaggtgattgatatgtgaattatcctgatttgatcattataaattgcatacatgtatcaaaatatctctctatatcctataaatatgtacgattaccacatgtcaactaaaaagaaaaagaaaaaaaaaaagcaattacctgatggctctgaaaagtaaaaatagtaggcaaattcaggagaggaatcaaagcctgaagaagtgacccaaataaggtaagttctctgttttctttcttcctttcacctttttttttttttctgagacagtcttgctgtgtccctgaggctggagtgcagtggtgcgatttcagctcactgcaacctccgcctcctgggttcaagctattctcctgcctcagcctcctgagtagctgggattataggcacatgccaccatgccaagctaatttttgtatttttagtagagaagaggtttcatcatgttggacaggctggtctcaaactcctgacctcgtgatccacccaccttggcttcccaaagtgttgggattacaggcgtgagccaccgcgcctgccctctttcaccttttatctttgacctgtgggtggtcctagtcatggaactatgcagaagctgtgggcaacaagaacctgatgaaaagccccatttttctatctctgtctgaaaaaaggggggctctgcaagcctgagagtgtagaatgaatctccatgttttcattttctcttctgaccatgtcccaagatgtggctctagtgtggaacgatccggaaacaacattgacagctttgtctctctggcagggagaagaaactggagaaagagacctctgtgttccaaaaagtgatttttttctttctcctttctcttactgctttacgttaaatagagccccatttgcatagaactgcatggcagcaatggcagcagctagaactctgatagatttatttttcaggacagaagaatagataaggggcctcttgggacctgggaatgtagagataagtctgacgttgaaaactgaactgaccttgaaactactgccagagaaggtgagaaaaaacttacggtctgaatgtaaccaggttgactgcttaaataacaatgttaagaataaaaaaaaaacaacgttcttcagaagattttaatgtgacccagggtcatattataacataatatgcaagctatccaggatacaatgcatatttgctcaacatacaaagaaccagaaaaatgtagccaattctcaagggaaaacacaatcaacagatgccaaccctgagattactcaaatgttggaattatcagacaaagacattaaagcaactattataattatactccatgaagtaaaggtaaacactcatgaaataaaggtaaacactcttgaaatgagtagaaagttagacattgtcagcaaatagaaagtttaggactgaaaaataccctcatctgaaattaaaagagaaattactggatgggctcaatagcagaatgaagatgacaaaacaaagagtcagtgaatttgaagaaagataagtagatttgaagaatagaaagaataaattagaaagaagatgaagaaatctcttagtcagtttgtgctactataagaaagtaccgtagactgagtggattgtaaacaacagaaatttattcctcacagtttggaggctgaaagtctgagatcagggtgctaccatggtcaggttatggtgaggaacctcttccaggttacagatagccatcttattattataatctcagatggtggaaagagtgagagagctctctgggatatcttttattttattaaaaaattaaaaagtatgtatttagaaagtacaagtgcagatttcttacgtgtatatattatgtaatggtgaagtctgggctttctgtgaacccataacccaaacagtgaacattgtacccaataggtaattttcagccctcacccacctcccaccctcccatcttttatagtctccaatgtttattaaagaatatcttttaaaaggcaactaatcctattcaagagggctccaccttcatgaactaatcacctctcaaaggccccacctcctaataccatcaccttgggggttaggatttcaatatgaattttgggggaacacaaacactcattccatagtaacaaagcttcagagacttttggaacaataccaaaatatctaacatttatgccattggaatctcagaagaaatatagagaaataatggagcagaaaaaaatatttcaataaattctggccaaaaacttcccaagtttggtaagacacagctgtataggctcaagaaacccagtaaaccctaaacaggataaaatcaaggaaaagaacatataaacacggaacaataaaattggtgaaaaccaaagaagaggaaacaatcttgaaagcagtcacagaaaaatgaaactacaaatgggagaacaacttttcacatgactgcagattcctcatatgaaaccatggagtagagaggacagtggaacaacatcattaaagtgccaaaagaaaaaaacagtcaacccagaatttgatagctagtgaaaatattcttcaggattgatggcaaattaaggaattatcagataaatgaaaactaaagagtttgtcaccagcatacctgctctaaaagaaatgctaagggaaattctttaggctgagaaaaaatgatatcagagggatacttaaaacttcaggagtgggccgggcctggtagctcatgcctgtaatcccagcactttgggaggctgaggtgggtggatcacgaggtcaagagatcgagaccatcctggccaacctggtgaaaccccgtctctactaaaaatacaaaaattagctgggcatggtggtacatgcctgtaattccagctactcaggaggctgaggcaggagaatcactggaacccaggaggcagaggttgcagggagcctagatagtgctactgcactccatcttggtgacggagtgagactccatctcaaaaaaaataaataaataaataaaataaaaaaaaaaaaaaacaaaaaacttcaggagtgaaagaagagcaacagaaatggtaaatatctgggtagacatagtaagatgattttttgtttttaggtatttaaaaatatatatggctgttaaaagcaaaaattataacactggtagagtttttaatatgtgaagaaatgatacatattacaactataataaaaagtgagaaaggcaaaagaacctatatggttgtaagtcttctacattttacttgaagtagtataaaatatgaattccaggtagactgtgaaatatacatagggtctatacatatacatatatacacacatttatatataatatatgtatgtattcatttatattgtaagccctagaatgacgactaaaaatcaaagtactatgtgatgttgttaaaaagcctatagatgaattaaaatggaaatctaaacacattgaagcctgggaggcagaaacactggaataaaaaacaaagaaatgaacagaaaacaaataacatggaagacttacctgaccatattaataattatgtgaaatacaagtggtctaaaaatacaaattaaaaatcagagattgtcagttgggacaagaaaacaagacctaattatatgctgagtacaaaaaaatcaatttctaattataatgacaggttaaaaataaaaggatgaaagtatcaatcagtggtaacctggagtgactacattaacatcacacaaagtagacttcagagcatacaaaacttaccaggaataaagaggggcatttgacaatgataaaatggtcagcttaccaagaagaagaatcatctaaatgtgtatacatgtaaattttaaaatatgaatctaaaatggatagagttaaaagtagacatagacaaatctatgattctgcttggacacttcaacattcctcttagtaattgagagagcaaataagtcaacaaactatagacggcttgaatgacattatgaaccaatttgatgtaattgacatttataaaacattccaccctacagcagcagaatacatatggtttccaaacatacacacagcattgaacaagatagaccatattctggcccatagaacaaaccttaacacatttaaaataattgaaatgttgaaaagtattctctgaccataagagaattaagccagagatccatacagaaagatatctagaaaatcctttaatacttggaaattataaataatccataagtcaaagagggagtgacaagggaaattagacaattttgcttgaactgagtgtagaaagaaacaaaatctattaaaatttgtagaattctgataaagctgtagttagaggaaattttaaagcattaagtgcttttattacaaagaataaaaggtctcaaatcaatctaagcttccgccgtaagaaactaaacaaatatattaagccaaaaacaaatagaaaatatagagtattctaaagtttatttggaaaggcaaaggaattataatgccaaaacaattttgaaaaagaataaagtagggccgggggtggtggctcatgcctgtaatcccagcactttgggaggcagaggagggtggattgcatgaatccaggagtttgagatcagccttggcaaataaggtgaaacctcgtctctacaaaaaatacaaaacttagctgggcacagtggcatgtgtctgtagtcccagctgagcctgggaggtcgaggctgcagtgagctgagatcgtgccactgtacaccagcctgggcgacagagtgagacgctgtgtcagaaaaaaaaaagaataaagtaggaagagccagtctatccaatttcaagatttattttatagctgtggtaatcaagagagtatattataaggagaggggtagacacatagatcaatgggaatagaatagataacccagaaatagacccacacaagtatggtgtatggatttttttttttttaacttttaaattcaggagtacaagtgcaggtttattacataggtacacttgtgtcatggagttttgttgtacagattatttcatcacgcacgaattaagcctagtacccattagttatttttcctgatcctctccttcctgtcaccctccattctctgaaaggccccagtgtatgttgttcgcctctatatgtccgtgtgttctcatcatttagctcccacttacaaaagtgagaacatgcagtatctatctggttttctgttcctgtgttagtttgctaaggataatggcctccagctccatccatgtccccgcaaacatgatctcattcttttttatggctgtattccatggtgtatatgtacaagaaaatgtggtacataaacaacatgacttattgatttttgacaaagatgcacaagcaattcaatgaatgaaagaaagatcgtcatttaggtaaacagtttaaacaattggacatcgataggtacaaaagtaaggcttggtttaagactcacaatttatttaaaaattaactcaaaatggattgtggctttaaatgtaaaatgtaaaactgtaaaactctaaaacatttagaaagaaatataggagaaagtctttgaaatctaaggctacgcagagtattcttggacttgacaccaaaggcacaatccataaatggaaaaattggtaaactggactttgtcaaaattaaaaactttccctcagtgaaaggccctgttaagagggtgaaaagacaagctacacacaggaagagaatattttaaagccacgtatctgacaaataactaatgtacatgaagttaaaatcctagtatattatgtatgtgtacatacatatgcgtatttatataaagaactctcaaaacacacataagcaactgaattagaaatggatcaatggtataaagagacatttcactgaagaggatattcagatggtaaataaacacatggaaaggtgctcattagcttttctggaaattcacagtgggctatcacaacacacctatcacaatggccaaaatagaataacaccaccaaatgcctgcaatgatgtggggacacggggtcactcacgtgttgttgtgggaatgtaaaatggtgcagacaccctggaaaacagttataagaattaatccctcttaaagaaatatctattcaaattcaatttatgatttagttttttgagacagagtctcactctattacccaggctagagtgcagaggcgcaatcatggctcactgtagccttgacctcctgggctcaagtgatcctcccacctcagctccccaagtagctgggaccatgggcatgagccaccacactcagttaatttttttgatttttttttcccctgtagagatggggtcttactgtattgcccaggctggtctgaaactcctgggctcaagtgatcctcctgccttggcctcccaaagtgttgggattacagtcatgagtcaccatacctggcccaaattcaatttagttgaacacatttttgtaatcttaaaatgtataaaagcaacgttagtttaagatcaggtgaaattaatataggaaatttaagaagttcagattaagctttctatgaggaagtaaataaactacatgtacataaattagaatattatactactattgtatttatactgttactaaatccaagagaaggcagattatcaaagtggtttaatttttttttgagacagagtcttgctgtattgcccaggctggagtacagtggtgtgatcattactcactgcagccttgcactcctgtgctcgatggatcctcctgtctcagcatcccgtgtaggtgggattataggcacatgccaccttgcctggctagttttttgcagagacaaggtctcactatattgcctaatctgaccttgaactcctggcctcaagtgatcctccttggcctcccaaagttctgggatcacaggtgtaagccaccatatctggcctcaaaatggtctaattttgaatgattcatcttgattaaacattgtttaattgtttgagaaatttctgtctatacagatatgtgtgtataactctctctctttaaattgttaacagtggtgattcagctgtgacccttcttatgacctaaatatgattagccaaggctattaaatcaactctggctaaacctttctttttgctttcagaactgcagtctcaataagaatgttttacttaaaggaaccaaaacatttgaagcattaggagttcatattttttccttttggatttattctatttaaaatttatataagtgcttacaagtctgtataaagcatttattacaagaaactttgtaatctgatatgttaattttcttctatttagtgttaactctatctatctgaactagataattctagagtttgcagataatggtcattgcagaattgaaagactttcttaaggagtggtgggggtggcgttaaccatttcaagctcagctgttctaggctgagcacatcagggacatagaagaatttccctctacagcccaagtcctgggaaaggtggcaatttttcatcttctgacatatcacagacacaacaaaaacaaactgagactggaacttcagaggacaaaactctagagtggatgtagtatatactgcttgggtgatgggtacaccaaaatctcacaaatcaccactaaagaacgtactcatgtaaccgaacaccacctgttccccaataaccaatggaaatacaaaattaaaaaaaaataaaaaatgaagtctcacgggagactaccgatcagttacaacacaaggcatgagctatggtacttggacagcttagcttcaacaaaacaaattgcagtttcagtgagaaatccaggagcactctgagctcagttgcctctgcaaggcacccaggctgcaggagagttggaagaccaagcctcagcacttgagggttccaggagctgtgcctttctgctttacaggttccagctggacaatctcggtggactcaccagaccgtccaagaataaaacaaagaccaccggtgctaaataatacaaagccatctttattattttgacagggaaaggaacatatgccagtgaagaaatttgctgagtggtgtaatgattaattttatgtgtctacttgcctaggtcatggtgccctgttctttgtttcaacaatataaagatattttttagatgtcattaacatttaggtcaacagattttgagttaagcagactccataatgtgggtgggcctcctccaatcagctgaaggccttaagagaaaaagactgacctcccctgagcaagaagaaattctgctgccagattgcttttatttacttgtttgtttgtttgtttgttttttgagacagggtcttgctctgtcccctaggctggagtgcagtggtgtgatcatggctcactggagcctcctaaccttctgggctaaagcgatcctcccacctcagtcccctgagtagctgggactacaggcatgtgccaccatgtccagctaatttttaattttttttgtagagctggggtcttgctatgttgcccaggctggtgtcaaactcctgagctcaagtgaccttcccaccttagccttccaaagtgctggaattacaggcatgagccaccatgcccggcccagactgcctttcaatacaactctttcctgggtctctactcttgatggccaaccctgcagatcttggacttgccagcccctaaaactgtgaatcaatccttaaaatctgtctctctcattcttttcatagcctattgtttctgtttctctggaggacgttggataatacaactagtttgccaaatagaaaactctgggggttttaactgctggaatggggaagttcacagtgattatgctaattaagcattgacttttgtcttctagacaggatgaaattattccttggatctttatgcagtctgtcaaaataattcccactgctcattgttcaggaaattgtcttctgtgaagtccaatgggttctgacatcccaggtcccagatactcgtactgcagctagttggagccagccgagacaaagcacaacatccattttgataatgagttggcaagtgctgccgtcagtgggaagattttctttcctctaatttcccatcaagattttcttctgactaatgtatactcagcatacatgagttctcaataaaaattgtgttttcttttttcttttaagattcaatagccataaattgccacaccaaggaaataaggctagagcaaaaggaaggcaagaagtaaatattaaagaaatgaaataagatttttcacccttttccctcagtgcactgatgtattttaatgtcagccatggccagagacctttgaggcatgaagggttagaatttgggtcttgttcatacttcctgaatcctccatcgagaaacctgagtgttagggactgacttgtgctctctgccccaaattcttatgttgaagccttaacccccaatgtgactgtatttggaggtagggcttataagggggtaataaaatataaatgagatcagaaagatgagactctaatctaataggattggtgtccctagaagaagaggaagaggcatcagagacctctatctctttctgctgtgtaaaaggccatgtgaagacacagcaagaatgtggctgtctgaaagtcaggaagagagccctcgctgggaaccaaattcgccagcactttgatcttggactttagtcttcagaactgtgagaaaataaatgcttgttgtttaagtcacccagcatgtggaattttgctatggcagcccacgcagactaagatgctgagacaatctctcctttggaccactgattgaggggagtcaacttggcttctctgatctaatagttttgctcagtggaaggtgacaccaggccaaagacacattgactccatcctttacttgtgttttcttgtaaaatgtagagtctgccacgccctggctttaagtcttttggggttttctcagtggctgcatgatcacattctaattcttcagaaagtcattcaaaaatcttcacattatgtggccaggaatggtggctcacacctgtaatcccagcactttgggaggctgaggtgggagaatctcttgaggctgggagttcaagactagcctggccaacatgacaaaaccctgtctctactaaaaatacaaaaattagccagtgtggtggtgcacgcctgtagtccaagctatttgggaggctgaggcatgagaatcgcttgaacctgggacacggaggttgcagtgagccaagatcttaccactgcactccagcctgggtggcagagtaagactctgtctcaattaaaaaaaaaaggctttcacattaaagccccaagctccttctcttcccacatcactttccactctatgtcctctgtcttctagtacatgggccctgtattaatccgttttcatgccgctatgaagaaatacacaagactaggtaatttataaaggaaagaggtttaattgactcatagttctggagaggcctcaagaaacttacaatcattgtggaaggggaagcaaacttgtccttcacttggctgcaggaaggagagtcctgagcaaaagggggaaaagctccttgcaaaaccttcagatctcgtgagaactcactcactatcacaagaacagcatgagggtaaccgcccccatgatttaattacctcccacaaggtccctccccccaacacgtgggggttacaattcggattacaattcaagatgagatttgaatggggacacagagccagaccatataaggccctgtgtagttggcagaataatggtcccccaatatacctgccctctgattcctgacacctgtgaatatggcacattacatggcaaaagggactttgcaggtagaattaaggctgcagaccttaaaatggggaggttagcctggctgattcaggtaggtccaatatactcacatgcactcttaaagatgaaagagggaggcagacaagccatagagaatggaagaggcgggagagagtcacagtgcaagagggacttcccgcgggtgctggctgtcaggatgagatgggccatgaaccagggagggcaggcggcctccagaagctgagggcagcccctggccaacagccagcaaggaaacaaggacttcattcctacaaccccacacagctgaattctgccagcagccccagtgagcctggacgtggatcctgcaccagagctcagcactgatgacatcttgattttggccttgagagacgaagcacagaagccagcagagcccgtgagatttctgacctcccctaggaagtgtaagataatacgcttgtattgttttaaactatgttagtcgcagtttattccagcagccacaggaaacattgcccccgcacatgtcctcatttgcatgctttcttgtgtgctgctgctgctgctgggaacacctgttctttagctcgccattacgttaaaatctcacctgtcctggaaggcccagcttccacggccatccctgagcagcacttccctgcccttaatgacagagcagaatgaatcacattcttctctgtgcttagagaattttgcttctatctcaacaaagtgcatgcggtgagtggttagcatctacgcgatggtcgccttttgctgcactctgacccttgtccctagcccagtgcctgatagtctgctgtcaatcagatatttattgggaggctatgttggtgccacacagatgtgtcgtaggggctaggtatacggggttgcctaaatcagacccagggcccttcattctctcatggaccttctaggctacacatattcagtgcctcataaacatctgctaagttaattgaaccgaggcctcctagagacaaggaagccacagtcaccgggaagcaggattggcctggtctgtcagggcagcctcatatatatgcacacacgagtcttcctcccacagcatggaccatctgccatctgcgggaagctgtggggcaccaggaatgctcatcgcagggttgtatttggttcagccacgatttgcctggggcgtaagagagtgctgctttcccttttctcctcaaacttcctttttataaggtgactgcaatgatatttacacacatcgtttccaaaaggcttttttcacattcgccatgacatttaaccttatgataaacctagggtgcacacgcaagtaaagcgaagaaaacatgcgattgattacaattgtatagctgttttatttagtctttcctgctgaaaagtccctagtttcagggctaatgggctggccttgttcttcaatgtagccatttacaagaaacagctgaagctaagttttgcttatgtttggaaatcaagcaagatctacatctcttatgaggcctaactggctttgtctgtgtttgctcagtagtgtacccaaccacttctggcttgaagctgtttggactggggttttaacaaataaaatctcaacttttatggtgcctcagtttaccatttaacagaggcctcagaagaaatccaccctgctgacccctcgattgcagacttctagcctccagaactgtgggcagataaatgcctgttagtgaagctgcccagtctgtgggtcttatagcagcccaagcaaatgaatccacttacctgtggccttatttaagttcccttccatccctggcctctctgcccccagtgtctactttaatctctgtgaccaagtccccatctccacggtgcaagttgggggccaggcgggctcagctgggccttgagctggcatagggtagccccaatgctgaagattcaccagtgataaacacagacacagagagacatatgtggggctgagctggaagctggatgggagagtcaggggctcaacgccagagaagaggcaggaagggtttcctgtgcagcaggggttgagggatggatagaagcctcagcatgtggacaacagacatgaattagaagctcctggagcctacagggaaagaagctgaggtttccagctgcttgttccagtggttacctctgtgtgcagtggaccttgctggccagaggtgaggcagctgggctgggaaacctgggaggagactcccccagctgcggtgacatctttcttcatgctcttcagagtcatgattcacacacttctcccccttcttcttctgggaggcttctacagtctgggactgcttcttcttaaggacctcctggatgcaccctttgtttgtatcccagtgtccagcactgtgccagacacagtaacttccctgtagatgcaggttgaaccaagggatcaattaggaaatcagtttgcatctgccacttgcctttcagttttacgacttttatctgcaaggcacaatcggtttggtggaatgactggccaagatggcaaagccaggaggaatttgcagcagggatttttaccctcattttggatttagtgcggtcaggtaacccgtgagtgagtctggaggatggctgataaaaatattcttggttccaaagttttcaagagctctggaggcaggtcaggcatgaaaactgtgaaatgatggcttgtcctgtagaactctacaaggaagaattggctgagtaaattattgaatagcaactttttctttcatttccttttttttttttaaccagtgggaagctgaacatctcaggacaggtattattatcactaaaaaaatagacgtcataaaatttatagtgcttcatttagagattggaagatctaggcgttaagccattttctaatgctgtaaaataagattaatgatgtgtcttttttaatgatcccttttttaagattaaaatctttgatgtggaaaatgttcattgctgttgctatttcgaggcctggatgaattaccttaccttctgtgtctgtgacagatccctgtgtccactgcaaagttctaccttcccatttattgggtttcctaggttttctaaatttactgatttaactctagtggttcaatttattccagaaatttattcactaactgcatggcactgcgctttcttacacaagggagttctttgatggctgacagtggaattattgtcaaccatcaataggaatacatgaacgtgtcctgtttatagttctgtaggtagaacttgggtaatatgagggatcctgacttgtttgcacgaggctcccaatgaggttgtattgttgaaattttaattgtaatttagtggataagcaagaaataatagttcagaggatcgtttcctaaagtcctttcattgtgaccagggattaaagtaagtggcaaagtaaacaaaaatgccaccctccaaatacggagcaaccctccccaccccaaactacccccaccctggctcctggagctttattgtggctggaggctgctgtccctggcagtgctgcagccatagatactgcctgttcatgggacagacctgtcttgtgtctcagcacacagcctaatgtgctactccttctgcaaatatcactctagtttcaacatagctcttctgtattttaacccgaatggctgatgctggttgtattcagcgatgggagagagcacctagagaaaaaaaaaaagagctgctgcttcttcctcttttctccctcctcagccagcatgatgcagaaggtcagctcctagaggaggagcaagcaggccaggacggcttcagcacccactcttgtgcgacttaacacttacatggtaacaccatgtgaagttcgcggacgtaaaaacaaacgatatcgggtcctctcccccagatgcgatgagcagcatgcagaccaaaggacagcggtccccacagtgcagcgtgctgtgtgctcctgcagaaggagggacagacatgcctgaggatgaagccactaactgggagtggggaagagagagaacagtggctgaacaggagtttcctagggacctgcagaagggaagagtgggcaggacagaaataaataatgccagagttctgtgtcacaaacggtggactgtcagcacggctggtgggaggggccgtgcagcacccagtcagcagcaaggctgggcgggcagctcagggccagactatgagtgggctttctagtgtgtgtggctctggccaggcacagtcatggttttcaagcaaggatttgatttaaatagatcagattcttctaacgtggagctcaggagggagaccaggcatggggtggctgcaaagcacctgccagaaatggtgaggcctgggctggggtggaagggggagctggacccaaaagacacgcttagggagaagtgactgagatttgtgagggagtgagatcggagacctgcagcttctgacgggagtgtcgagtggacagtgacaccgtgcacccagaaaggcagtgatagaaggtccagcgggttggtggggaaggtggtggaaaggcccttgaggcatctgcctgccttctctgcttttcaccccttgccctgcccttgtcagtcttgtgagccttggtgagcactggggaacttcaccgggaggggcagagccatggccccagcttggagggggtgcacaggaggagtgtagcctggagaagcctgcccgcgcctccttctgtgggtgccagcagtggcttgggctggtgttcccctgcttgtgcattctattagcctgtgccagtccacgggccagtggctgggtctcatccgagcaaggaaatttggagcttcccgctttcctcttgcttttctttagacaaggcatatggtgaacgcagtccttccccagctgcttctggcgggtgtggcaaagcacaaagtgcggagatctcctggttcagggagagagggatctggtgcctgaaaaacgtgacgtgaacacttggcttttcttaaaacactcctcattgctttcctagcatagcagttattttccgtcctctgggcattggtgacagtgtggccgctccacagatgtcaaaaactcaagttaatgcaaagactttcacttctcaggctccaaaggcctcaacaagcttcccctcatctgtgttcatggacttaaacttcatgttgtcaaatgagtattaggtaatggcagaaataacgcatgtatcacacatttatggatttatttcccttgcatttattttactttagaacaccatgacccaaagcagagctcttgaaactctagtcctacaacacaatctttgaaaaatgggtttcattttcagatgcttgggaaatattgcattccctatgctcctcttgcacatcaattgtcagctcacaataaaggctctgagaaggcctgcattataaaactgtgcagacagggtctccccaagttgtcacacgtgagatcccggactctgtttagtggtttttggtttttttctaaatgcattttgaacagccagggtacagacttccgtgaagaccaccctagaatgcacaaaccacacaagcctttctaagtcatgttgttgagtctgtaaaagaggaggaaatttgggaaatgggcggcaggcttttcctggccctcaagagaagagctccctcctttttgcatcgatctcccttttccatatttactttgcctctaattaatttttcttattgctcttcaccctatttcttggtgttttgcctgagatgaaagtaggataattagttccttatctctgttttaaaggaatttcatctggcttccagctcaggggctaattatggctttatggatttccttctttgaaatacatctatgctaaatactgccagcttctcattcacttcaggctaaagtgggaagctctgtaggcctaattctctcccttccctgtagattcatactgttaatgataaaaagggggagaggaggctgggtgtggtggctcatgcctgtaatcccagtactttgggaggccaaggtgggcagatcacttgaggccaggagttcaagaccagcctggtcaatgcggcaaaaccccatctctacagaaaagaggcaaaaattagccaggtgtggtggcacacaccagtaatcccagctactcggggggctgaggtgggaggattgcttgagccctggaggtggaggctgtagtctgctgagattgtgccactgcactccagcttgggtgatggagtgagactctgtctcaaaacgaaaaccaaaacaaaacccaacgaagtcctaagtcagcccaaaaagtgggggagaaattaggtgcactaacaaggaatatgcgcatgttataacttcaggctatttctgtttgtcaggagattgctttaccagggccaattatttggttcctctgtggctcagttttctcatctgtaaaatgggagaataacagcatctacctcacaaaattgtagtgagaaagaaatgtcaaacatttagaataatgattggcacagaactttaataataataacaacaataataatacataatgttacttctaaaaagatacttaaatgagtctttcgaaattgacacctaagtcttttgcccaggctttactcaataaaaccaatcatgataaatcctggaaaatagggccttaacatcacagtgttgttttattttttaattaattaattaattaattaatttttgagatggagtctcactctttcgcccaggccggactgcagtggtgccatctcagctcactgcaagctccgcctcccaggttcacgccattctcctgcctcagcctccccagtagctgggactacaggcgcccgccaccgcgcccggctaattttttgtatttttagtagagacggggtttcaccgtgttagccaagaaggtctcgatctccttacttcgtgatccacccgcctcggcctcccaaagtgctgggattataggcgtgagccgctgtgcctggccaacatcacatgttattaattcaccaagcattgctagcacttttgactttattttggagatccgaaaatgcttctgggctggacactcaaatagcagagtgagcgacaggtcctggggggaatttggaggtctgattctgcttcccagtccgccacttcctagtgatgagctcctgggtcactaccgaatgaccagtgctaacgtgcactgagggcttactaggtgctgaccaaagttcaaagcacctttcctgcatctccattgtggacatgggacagtgaggtgacaagaggtgctcagtcaccaacgaacctcaatttcatctgtgaaataataacacctcccactcatcccacccagtgggattatcacaagcttgaatgacattgtctagaaagtactttgaaagctgcagcattctggtggatgaaggtaggaggtcctcagattttcacttaaaagcttctggttgacgcgtgatttctcccctttgcaggaagctgacaagaagcacgttgctgagtgatcctgggttcccatcctccgcacccgtgcatccacgcgtgggcccagccagcaaggagaagtctaacaggcaggaggaggggagacacaaggagcccccgcagtaagtcacaagaagctgcctgcactctgactttctttggctttctcagcattttgtacagggttcccttgactgatgtgggggttagaactggaaggaaaggtccctctcctcccatctggaggtgttgaagcagcactgggcagagcccaaggtggtacctctggggctatggcaggacaggggtgttcagtgggctggaagcccccgtccccaacaaaacatctctgacctggctgaagacattggaggtccatacacgtttcatttgaaaaaggagtttctaactcttaaaaagacagaaaatcaccaatgaagtccaacccttagtgagaatcaactgacctttcctctgcactccatcacattttaattttttttttaattttactttttttggagacagggtctcgctcagttgtccaggctggagggcagtggcatgatcacagctgattgcagccttgatctcctgggctcaaatgatctcatctcagcctcccgagtacctgggaccacaggtgtgtgccaccaaataggtgtgcagctaattttattatttttattttttcatagatacgaggtcttgttgtgttgttcaggctggtctcgaactcctgagctcaaggaatcttcccaccttggcctctgaaagcactaggattgcaggcacaagacatcattacattttatggaggttctgtttgcttctgcaccttggtctaatcctatgatcagttatcaccaagttggtctctcttatgccactgtatgttcctgaaggagaaatagtttatttttccttgtgccccacctcaaaggatgatcaacatattaagccaacactccagaatgtataggcttccaatcaatgcgctgtcttgcaaatggtcccagaactaccctctcttcaatatacctcttttgacagagctcagcgtacaggaaaatctcctcaaatgcagaaatttgagtgtgaatttaattttcagtgcatcaaaaaatcatttagcactaggaagatagcctctctgacaggaacggtgtgtacctctaaagaatgggttccttgagagggtaggaaatgattctgaaggcttccaaacacgaaaagctgccatgctggttgaaaaaaaatcagttatgttatttcagaattctactttctgcttccttcccaatcatacaagctacacgacgtttaactctgtgtactaggcagttctgcaaaggaacaggcagtccttgggtctgggttgaagacaagagcttaagtccagtctctccaagcactggttagctgcatgcaacatggcacgttcacggatgctgcattctgaagtcaggatcactagcaacagatacaaagagaccctgggtgtgatggctcatgcctgtaatcccagcactttgggagggatcacccaagtccaggagtttgagaccaacttggacaacacagaaagacccctgtctatacaaaaaaattaaattaaaaaagaccacgctgggcaacatagtgagactctgtttctacaaaggagatcccccccgtccgttttttttttttgagacacagtctctgtcacccaggctggaatgcagtggcatgatcttggctcactgcaacctccgcctcccagattcaagtgattctcctgcctcagcctcctaggtagctgggattacaggcatgcaccaccacacccggctagtttttatatttgtagtagagacggaatttcaccatgttggtcaggctggtcttaaactcctggcctcaagtgatccacctgcctcagcctcccaaagtgctgggattacaggggctagccactgcccctggcctttttttttttttaagggtctgtgtctcagtatgttgcccgggctgctctggaactcttggtctcaagcgattctcctgcctcagcctcccaagtagctaggattacaggtgcacaccacctagcctagtttatcccaaatttttaaatagaaatttttattcccttctctggaagaaatatgaaaaggaccaaagcaaagtggttttcacttgtttgtttgcattttggaagtgagattgccttatagatcctctttcccaatattactataaattaaactgactttaaagtgaccaactttcctaccaagcttaccgcactatctaaaggccttgtgttctaaaagcaaaagatcaaatcgtatgttttaaagaggaatggtgccattgttattatgtggatgctcactatgtgtaggttctgtgttgagttttactcagtcactcatttaaacaatttatttgttaatgcatcactttgtttattcacttaacacctgtcttgagtgcctgctatatctcaggaactgtgatagacattggtggaaatagaagtcagtgagatacatgaaggaggctagtagtaaagacagaaattaagacaaacaaacacaaaaatgcctgagaattcgccaggccctgtggctcatacctgtaatcccagcactttgggaggccgaggtgggtggatcatttgaggtcaggagttcgagaccagcctggccaacatgataaaaaccccaactctactaaaaatacaaaaattggccgggcatggtggcaggtgcctgtaatcccagctactccggaggctgaggcaggagaatcgcttgaaactgggagacagaggttgcagtgagcccagatcgcaccactgcactccagcctgggtgacacagcgagactcagtctcaaacaaacaaaaaaaaaagcctgagaattgttatgttaccaaaaagaaagcacagagtgccacaggagtcctccagcatttggctgcaccatctttctataagctttacaacaacgctgttatcatgcccactgtgtagatggggaaactgaggggtggagcttacttacggagtaagagtttgcaaagccaagttgaccaaactctacatgttcttaccactccatctccttcctggcttggaacttccatgctgaaggttccagatggacctttattttagagaccttagaactggcttaggtttacatgctccagagctcactagaaatgtcagggaaggcacagccatggggaagggggtgcactgtgccaagaattttgcttaagaagccagctcaacagtgaaaggtgatgatcattttcaagtgttcttggtttttcatgtgtcataaaattgcactattcaggaataatcccaaaatcaaattaaaaacttctatgaaaatatgaaatggaaagcttactgatgcatgcttataaactggttactgtactttctctgtggcctcagggctggagggctgtgttttttcagaggtgaccagggaccatccaaacacagcctccttccgcacttctcttaaccagcgtagactcttctggtcccattcagagagtgaattccttcattatctgggaaggcgtggtcccacctacttatagcaatgaggggccaccttcatcctaacccatagggtgcaactggccacagccttgcctatccgtataatgcacaattgtcatgttataaccacgtgggccaccctggcttgggccatgtttcctcagccccctgggaggggtggtggtcataatcatgttctgcaatcccaatgaaggctcccccccagttggggaaaagtcagcctgtttgttggggcaagaatagcccacatgggcaggatatcccctcaatgaggcagtggtgcggctcccaggggccccaggacagtagccacactgccggcacacacctcagactccaggcagcagctgctacctccagggttcagctcccagttccccggcccactctgttctctcacccttcactttgctccaagagaaagctttgtttcatgcttcagaaaactgctgtgggcctggaaagccttccaggcagaggcattctaattagtattgtgacttctctgggaaaatcattttccaggcctcaaagaacctctgatgattctctaacttttcatgagggtccctgggacatctcagccatgaagcttgttccacttaggtttttgaatcagaaatgcaggaattttccgctggtagtggctggagcttccttgagatgagtgaagagcaagtgaactctcccgcctcccaccatcaccagcctggatcaggaggggagaaggaacttgcttgcacattttgcaaccaaaccccatggtagaaaagggccctcgtagtgggtcttaagatagatgaaaggaaaaaaaaaaaagagtcctcgcttgctccatttccccagccactgcccatggatgccaccggttgatccctccacttacctatttaagtattgctccagcattccctgtgtgccaggcggaggtctctgctggggtgcagtggtgcaccctgaagtcccgttctggcaggggagacagagcatggacaaatgagcaggtggaccccgaaatgtcaggtagcaatgctgagccagaaggatcaacagcaggggactgaggtgtgtgtggggggtgtgtgtgctaaacagggcatcagggaaggggaagtagtctctgagcagagatctggtgaagtccaggagagacccatgaatatccgtgagaggcttggtccaggcagagggcagggaaggagcaggtcctgaaatgacgtgggcctggcctgtggaaggagcacctgaaggctggcatggagggagggactggccgcagggaaatttgaccagcggctccttcgtgtggcgcaggactggcagcaggggactttgaccggcagctccatcatggggcacaatcttctaatctctgataagcggcccttttccgtggagctgtcatggataaatgttttctgtagctatttgtggagcactgggtcccgttcctttctacgagagcggccgttcccaattgggtgtgactttgctccctatgggatatttggcaagtttggagacgttgtcacaacttgtgtgtgtgtgcaggggtgcgcatccagtggatagaggccaagggtcctgttaagcataccacagtgcacaggacagtctcacaacaaggaattatccaacccacaatttcaagtgtgctgaggttaagaaccctgaaaccaaacaggagtgtcagcgagcacagggaaggttgcacgttttgactgacagtcactggtaccaggctctggagggccttgtggggtgatggaaggtatatggggaagaggtgctcggcctctgcaaatccttctcccatgggagagaagtttgcatggctcacaggtgagacccatccccacagtgaccgggacagagcagaccactgcctgggccactgcctcggcctctcgtacagtttagcaaagaccaatttcagagcctgagaccatgagctctggcctaggatggatggatggatgctttcactttcttgacaggtatctccaagacccaaggccatggctagcccatctcacagtggtgctcactgggctaagcaatttgcgcacattgacttatgatctgccctctgctacagcctattttctacatggtagtgctaagcagtgagcaggtacgttcctggtgcagggtgtttgcctttgctgtgatctcatctgcctggaatgctccctcctcatttctgccctttcaccatggggggtctcagctggaacactgtccccatgcagaggcccttagccctccaattcgtttcccttatccttgtttttataccacttactagcctaattgaaaacaagctgctcaaatgaagaagtcattgtagtataattaaattactctggtcttggaaacaaaaaatggaggaccctcctcccaaggacaatttcagggaagaagcttccagctccaccaccagcacccaaagctgaaattctacctgaacgattccctgatttttatacttggagcgcaataagtgtattttaactgtttacatttaacatataaatgtaatttatatgtcggtattgacatgtatccaggcttggcttctgtggcccctgctgagactggccccctgcccctcagagcagagctctaagtctcagtctcccagggccctttctctgggtcctgcaccctcctcccccaccacctttattaaaaaaacacctgccccatgtcatagcccctcaggtgccggctcaattgaggtgtccgtagctggacagaggtctgatgtgcttcttggtgcaggacgtgctgggtgggaaaggaggaaagggtgggaagggagtggggggaacagcaaccggggactgggagggagagggcagggggcaccccggaaggcaggcaggctcacctcctgtcccctctgggctggtacccaccccacttgatgctgcctgaggcggcatcctgtctggccctgctcagctgtgagtgtgccaggcccgtatggttaccccaggaaacgggagctgcacaaagccacgtgcagaatcgcgtgggagtttaataatcccggctggtgattgctgccccacggctgcgttcctctccatcagacccctcataggcttccctccaacccgacgctcaagcttccgaggcctgtccgttctctgaagcgattctacaccttttaggctctggactccatgttcctaatttgtttttggagcggggggtctctcctcacttccctattagctcacgtcatctttgtgcaagaaggatcacatgtcagccgtggggaagaaagggctggcactgctctgaagctgctgaagttatgacattaaggaaaataagccagcttcattgggcttggggtaggcgcctgagcattgggacttttaagagtttcccaagagattttactgcagccagggttgaagatcactgaattgaatgatatgttctcaatcccttaaaaaatgtatatttgtctacataaatatatatctatttttcctgccagagaaaggtggggtcccactggcttcagctcctgcgacccctcccccacccccgcactatggctgtggtacatcagtattcatttacctgggggccgcctgtggctgtgtgacccaggacaggccctctgacttctctgtgccggagtcgtctcatccgtgaaatgggaatcgtcaaggcatctacttcactgggtcgtcactgcgcagtcccatagcgccccacgccttgcatgactttggctcattcctcataatcaggccttttgcttagcatctctttttaaaaacatctggttgtggtggtggtcgggggcggtgttctttccgggggcatctggggtttgagaagcgaaggaccccacagccttccctctcctgtgagtgttttcaaagttaactttgggacggttctcccggagggccagacagaaactcaaagaaccggcctcaggggatctgagcaaattccaccgtcgtcaattcctggtgctccgtgaaagatgctctttccctcggggcttcggagccggagcatttgtagacagttcctgcctcttcactcggctgccggcctgggggtcccgtcgcctcccggagccgcccgccgcgtcccccagcccgcgccgccctgcgcggcccgccggcctcctcacctatcagatttcctgtgcgcatcgccgcgcgctcctcccacctcctaaatgcggagcggagcggggagcaaaaccatcctcggcctggacccagcgcctccggggaccggccgcgcgccccctgcgtccgcgggccgggatgcggctctgagccagcggcggcttccagcccgactgggcctgccggggctgccccgcgcacggtaaggcccggggctggggcgcggggcgcggggagcgctggccgggagcggggggccgggtcctgcggcgcgcgggggcgtgggtgccgggcgcaggggaccgcggcgcggccgcgcactgcaggcgtgctcttctgttttctccttcgttccttttaaatgaagggaaagaaaattgttacagaccaaatgtcatcaaacttggtgtgaaaacatactcatttataaagtcttatcgctactcacgccacgccccgaggaagttgtgttcctgggtgggcacggtgcggacacaagacttagggaatcagcactggatggaaacatcgcacaattaaaaagaatggcctaatcttaagcaacaacaacaaaacaaactctgaagcaccctgcggcaggcagcttctgcatcgtgggggttgtggaaggggctgatgggcaggatcatgagaaagacagcttttcattaagagatgacaccaggggttttgactttgggaggaccagaagggagtctgtaggtcattgctaaatacagtgaggtaccttaagactcagtaatgaacattattttaaaaacaatatctgtaccgtgtgtgtgtgtgtgagtgcgtgtgtgtgtgcgcgcgtatgtgtgcgcatgtgcacgtgtgttctcacacacaccgcaccataattttccttcgtggttttgtttcgttttttgtttaggtttctgactcttgagggataaatacagcttccaaataatagcaactgaatctgcagtaatcagatgttggaaaattatttttcactggtcctttatgttagcatagcaaacttaagtctttgttatatgtggccacctattgtaaatattaacattacttctcatctccacatcttcctcatttactatttttgtctttttcaaagagatggagatggaggaggagtagaatttaatgaagatacagatctggggaagtgtcatgtttcgttgggtgcttggggtaggcagtggctgctgttgagagtattttacagatgtaggaagtcttcggaggggcatttctaggtaaatgcatgctgattctgcccatctttacatgtaccttttgtggtgtttcctctttaaaacaggtgcgtgtaatatgcaaatttggtttcaaagggagaattttatatcttttaaggaatgattgcatgtgtattaagtcttgtttcctatctcctttcattttttccttctcttttaaagtcagttcgtcttaagtagtttctttgttaggtaaatttaataataataaaaatctgacgtgttcaggaaggagctcagtgtgaggcccatggacgttacctcctggagatgcaaatcggaaagagatgtttcactatgctgtcacctcagaagattgacaaggacaaggttgtctttgcaaaggttcttccagacaagggcatcccttcttttgtaggatttctaagtaggtactttgaataaacaagggccacctttaatagttggttttatgagattctgcatacctcaccatggccaaacttctccacacggatggtaaccttcatccatgcagcagaggacacgaaggtgtagccctccctcctctgtccctggacagctacagattcaggccagttcagacgggtccaagaagagtttcagggtctccatcttgtccttcctgggcatggaactgagcccagtactggcatcccaggggatgccccccatgcatgcttgtccatttaactgggcgtctgatcagatttctgcttggttttctgccaggcctagagcctgatcctgaatcctggttacagtgactttgaaaagctgcctgggctttatcagcctctctccccgggtgaccgggatactgatgaggatggagtccctccttgtacctgacagacgtctgtctccctgactataacagccttgttcctgggtcccacccaagcttcgtggccctgcataaacccaggtttgcagcctgtgttcattgctcttctgtcgacctttctcctcctactgcttactttcctctgctgccccttcctgctcccaggtaagtccttggacttggtgagggctcccgtattccttgttaattccagtttcttctcttttgccttggcctgaggatagggttccatcaagctttgtggctgacctcttccgagttttgacaacacttctttgcccgtggaaggagggagttaactgaccctgtgtctgaagatgaaaggtgaaggggtgggtaagatgatttatagagattttgagaactaacatggccttcagttgaaaaccagaattaggagctctgagtatcgtgcaggtgcagtgagattcatttgaaaaacaaaacaaccggaatttttatatctaattttgaacatcatccccacatccttaatagaagacatcggagccagaagtcgtttgggaccaagttgggtaaacagagtggctgatcattcattcacgcattgaataaatattcttgcagagataaatagctcaggctctgcagccagatgactggttgcaaatcccagctttgacaggtacttgttatatgaccttcggcaagttacttaatttccctatgcctcagtttcgttaattgaaattgaagagaataatagtacttatttcataggggtggttgtgaggattacgtggttctgtatataataaagaacaatagaacagtgccaggtatatacatgctacttaagttatagctattgttgttattatgacttcttgttgtgtgccaagcactttaccatgctgagtaataattgttttggatcaagaatgaggtatggaaagaaggaaacaaaactagttgtttcttattgaattttaaaaaataacatgatttgaaaagtaattcccaaaaagttgtgagaagaatattgtgagcaagggcagaattatttttataagatgactaacatcaggggaacaatatttagtttgttatttaaattttggtccctgtctttttttttgtttaagctgtagacacaggcaggagcattgcttgagtccagaagtttgagaccagcctggacaacatagcaagaccccgtctctgaaaatgaaagagctctgattttttataattattggaaaccattcctcagtgttcctattcacgtttgcaatgctctctctctttttcttactgtttctaatttattcatttttccatagaggtgttttggtgatcactgtgcttcctaaactctgcaagttccctttttaatctcgttccgtctccttgtcattgcttgtggctctgttttgttgatttcctgttcttagtttcttgtagcaataaatcatttactgtgaaaacttttaatccactgctgggagtatattttcttccagactgtggcttcttcacttgtcttttgcacatttccttttgtttcatttcctccttcctttctgtggtatttatgcatatttgctctgccatttctttatttgtcaagcatatttaacaagggcaggttcagctgaacctttagataacaattttttgaattgtcctcgattgcttctctcctatgtgaacatcgtttccttcccagagcttcctttggtgtcctggagatacagtttatcagcttttctgtggcctgaggatatgaaggagcagaagcagtgggaatgatggataatcatgattggtggatttagtctctattcattttgattaaatttattaaaatttatagttttattaaaagttgctctcaggatacactcaggttttggattgcccccaaattcaggatgtaacttggaggcattacattttttatttttcaaattttgaagtatttcaaacatgcagaagtgaaataataatagaaaaagcatgtgtgagtccacatcccagctctattgtgtcctaacacttggccatacttgcttagatgtagaagacaataggaaagcattgttgaagctccctctgtcccctccctagttctccccatctcctttcatcccttctcactatcctgaattattactgtcttttccatgtgtgtttccacatcacttctatgtataaatctgtgattaattatggtattgacttcaatatttcaagctctctaaaatggtttcgtatggtcctactgaagctctttttgattcattgttttcaatatttatccatgttgagacatagcttgtattactccattttcacactgctataaagaacttccagagactgggtaatttataaaggaaagaggtttaattgattcacagttctgcatggctggggaggcctcaggaaacttacaatcatggcggaaggggaggcaggcatgtcttacatggcctgagagagcaagtgagagaacatgtgagcgtgtgggaaaaactaccatttataaaaccatcagatctcatgagaattctctcactatcaggagaacaacatgggggaactgccttttaatccaatcacttccctccctcgacacttgaggattacagccggagatgagatttgggtggggacacagagctaaaccatatcacagctgtagttcaagcttgtccaacctgcagcccaggacggctttgaatgtggccccaaacaaattcataaactttttaaaaactttgagatttttttaaaagctcatcagctatcgttagtgttagcgtagtttatgtgtggcccaagacaattcttcttctaatgtggcccagggaagccagaagatcggatacctctgtgggtgtagttcattcattttcattgctatgtaaaatggtaggctgaggtgggaggatctcttgagcccaagagtttgataccagcctgggcaacatagcgaatcctcatctctatgaaaaaaataaataaataaaaaataaaaaattaccccaagcgtggtggcatgcacctgtagtcctagatacttgggaggctgagatgggaggattgcttgggtccaggagtttggggatgcagtgagccatgatcaatccaatgcactctagcatgggcaacagagcaagaccttgtctcttaaaaaaaattatattgtaggattgtactacaattggctcagctattgttttgttaatggacgtttagatgattttcatttttcatataaaaatgctataataaacattcttatacatatctcctttgcatacatgttagagtgtactttagagtacatacctagaaaagatgcattgggtgaaaaagcatctttcctagatactgaagaatgttttccaagggatttgtaccaatttatgctcctacatactatacctctaactcagttcctgtttttccacagcttccccaacccttagaattattggatttttaaatttttgttattgtcatgagtatgaagtagaatctcagtgttttaagatgcattttcctgattctagtaaaactaatcatctgtttgtatattatgtatctcagccatttggatttcctcttctgtgaatggcctgttcatgtattttgatcatttttcatttggaatgtctttttcttatagatctatagaagctcatttagaaattctagatccttaattttagtaatatacattgcaaatatctactccgtctgtgtcttgtatttttacattttattgaacaataggttttcatttttaatttggtgaaatttaccacttttttttaatggtttgtgctttctcttaagaagaagcttttcatcttatgaaattcttccccactctaaggctataaagattgtctcatatactgtatttcttgctaaaagccttcaagttttgcttttcacatttaggtttttaatcctccttggatttatttttgatatgttgtgagttagggattcaaattcaattttttcaaatgaatagtcagtcctaggttgttaattcagtactcctttttctggtgatttgtaataccatttgtaataccatacttgtgtagatctgttttgaggctatttattctattttatggtctgcttgggctgccataatgagataccatagactggatggctaaacaacataaaattattttctcacggttctggaggctggaagtctgagatcaaaggtgccagcctgatcaggttctggtgaggaccctcttcagggatgcagatacatcctaaagattctgtctgtgtccttacatgcagaaagagattcctttcttcttatgaggccaccaaccctattgaattaggatcccaccctatgacctcatttaaccttaattacttcctcaaagctttgtctccaaatacagtcacattggggttagagctttaacacatgaactttgggtggacacaattccgtccatagcattggtttataaatcacaagtatcttattgatgtaataagtttttatatatactagatcaagttaggtcaagttttcccatcttgttttgctttataatgtatttagctattttttgccttttagtctatgtacgaatctgaggttcagttgtcaagttcatttccaaaatttgtaggtttatttttgagatctctgttctgttttgtcatgatgtattttgtttgtttctgcccaaacaccacaagttttaattgctgtgactttataatatgtcttggtctgggaaggtaagttaccactttgttcttttcagccattctttttcttttctttctttcttttattttttttaggcagagtcttgctctgtcacccaggctggagtgcagtggtgtgatttcgtctcactgcaacctctgcctcccgggttcaagcaattctcgtgcctcagcctcccaagtagctgggattacaggcgtgtgccaccatgtgtggccaatttttatattttttggtagagacggtatttttggtagagacagtattcactatgttggccaggctggtctcgaacccctggcctcaagtgatcctcctgcttcagcctcccagagtgctgggattacaggcgtgagcctgcccggccataatattcctaatcttcagaccttgtttgaatttttccaattttcctgtaatgtcctttttctggtccaggatcccagccagaatcccatattgcattgggttttcatgttgctttattcatgttcaatctgtaatagttcctcagtcttctcttttgtaaacttgacatctcagaagagttcagggtagttatttgtagagtattcctcaatttggagttgcctgatattttcttatatgcagactgaagttatgcatttttggtaataataccacggaaatttgataaatgtgatgcattttctattggttctgatagtttacatgtagagtctcttggatgttttatgtagataattgtattagatattttggttatttgtgtctttctagcacatgggaggattttgcttctcccacctcttgaagttacgcaaagcatgtggctttccctggccaatgaaaagggagctaaagggatgtgtgctgagacattgaattgcaggtgcatgatttcccagctgtctttgctctgcttgtttaaagcaaatgttgatatgagcataccattagatcaaaatagcatatgataataaaccgacctttgtatgcttgccttcaagagtagcctgaattagcaattgattttgcttatgagaagataaacttgcagtgttaagaccccgagattttggggttgtttgtggcataacctagcctatgtggtctgacataataatcatattgtctataaacaagaatagcttagtttcttctcttttatttcttatatacatcttttctggtcttattccattggctgggacctcaagggcaatgtttaataaaagcagtgacaggttaggtacaatggctcatgcctgtagtcccaacattttgggagaccaaagcaggaggattgcttgaggccagaagttcaagactagcctgggcaacatagtgagaccctttctctgagaaaaaaaagtgataatggacatccttgtcttcaccttcaccttaatgggaatgcttttaagtttcactatcaaatatgtctattttagatatttgatggacaccctttgtcaaattaagaaagatctcttttttattatgaattggtgctgaattttattgattcttttttgatgtagcttttgaaataatcatagactttttcttcctttaatttactggtataatttattagtgcatttcttgtgttttatttaggacctttccatttgtattcaaaagagatattgttcataattttcttttcttttactatccttgtctgaagttgtgtattttttctctgtctcttggaaatggcttgcacaaaaaggttttttttttttgttgttcctttaaaatttggtaaagctcacctctaaatctttctgggttgttgcatcgtagagtggaggcagtggacttctgatgacagattcattgtttatttaggttctatttccttttgtttattcaggttctattccttttcaatgaactacattaattcatgatttgctggaaaattatttcaaagttttgaaatttattggcataaaattgttcatagtattttcttatgatttaacattttaaaaatttctctgttgcagacctttttgactttaaatatgatttatttctgtctctttttttcttgttaaatcttggtaaagttttatttgctttattagtttttctgaaagaaacagtttttgagtatgtagataatttctttggttgttttattctgtgtatcaatgacttgatagttatatcctcgtctttttctttttctcacctttcaaatgtttattgctcttttttcgtagcttcttgaagtatatgcttaatgtattctacatatttattcttttgacctataactttatttctaaataatttttaattgctgtccacaggttttgatatgttggtctttcatttttatttggtttaaaatatctattatgatttcctctttaagccataagtttttttgaggcctacttttgaaagtttcaaaacacacatttttctccagtatgtttttattgttgatttttaatccccataagtggtatgtgtgcaattgaaaagaatgtttactttctgtttctgtatggtttaataaatgaagtttattaattttcattgtcaaatcattattactaatttttgttctatttggttacacgtttctaaaagaaatgtgtaaaaataaaatttattcttagaatgctatcaattttttgttatatgttttgatgctgtgttgttgaagcttacaagttctaaagatctatattatactatctatattataataatttatggtgaattgctatgtagtgttgatacttttggcttgaattctttttgccttacatagctgcattaggggttggtttctttttcttttctccccctaactaatagcaagtatctttcctgcctatcgttgtagctttactttgggtgtgtcatttgaactcgcatataggtagattttttccaacctgcttattgtgtttctaagcaagtgaacttaatccatttataatatacataatttctgaggcctttggatttaattcttttatctcattatgtgttttctttttcataccttttttctttagttctcttttcttcattttttcgtctcctgttggattgatacagttttctacattcccattttacttcttttgctggttttcagactgtagactgtatatatatttttaatgattatatttaatcttgaatcatgtattttaacgatatataaacatttttggtattcctggtattttctctatcatgacaaggacctcagcacaatttaactaacaaccttgttcccttattttgtaactattccttagtttgaacttgtaaattttcttttcttttcttttcttttcctccctccctccctccatccttccttccctccctccttccttcgttccttctttccttccttcctccctcccttcctccctttctctttctttctctctctctctcttttccatccatccctccctccttcctccctccctccctccctccctccctccctccctccctcccttccttccttccttccttccttccttccttccttccttccttccttcctctgtttctcttttcttgggtaatttcctatatttttggatgttttaaacatgaaaatgtagttatttttatgggcataaattagttaaatttaatgatatatttgatcaatttctgtgctcatttttgtgtcctgtatcccttgacatacacatgagtttatgcaacttcttgctgaactacattcattaataattaatattattgaggctacatgggtgataagctttcttactatttctgtgtttgaaaatattttaattatggctttgcttttgtgtattagtttaactgggtataaaattttagatgggcagttacttctttccagcattttggtatcttctatatgtattattggtcatgggaaatggctatcagcttaattgtgactgttttgttgataatttgcctttctccacattagcttttaggactttctcattttcgacgttctgtggactcactatgatgtggaagataggtttatctttatcatggtgagtacctagagtccagttttgatttgagatctcatattttcaattctggaaaattctcagctgatatgtcttcacatattttttcctctgcttttcctccattcctttcttcaggaacccttatcagagtaagccaaccctcttcatgtatctgctacatctcctttgtctgtccaataagtcctgattgttactggagacagttatctctggggaaggagaatgattctcctttcagtcacaaccttccttctctctgtgaaaagtggaatggcaagtctgaaggtttctttctcatttatctccagaggatcatttctcttaagtctcctcttcaccacctctgtttacctttctccaatctgggaagggaaactattaatgaaactttgatgaatttcagttcctcaccccttttctgcattcgctccccccataaaacatacatgtaaaattctggtgtttttggtgtttttccctggccaccactttcaaggagtattccaaaagttgtgtccctttgtttgggtgctgcttgtatatttttggccaatttgaacttacttttttcatttcagtgtgggcaaagtagagaaacaaatgcccccaggccctactacacatttgagcaataatagttgtgaatattattcaactcatcagcagttgctcagagtgggtgttcaatggcttggttttgtagggagtctggcataattcccaggtgtctggaagctttgaagagaaacaggtgcctattataattggatataaatgaaggaattgaggaaattgaatgaggcaaatggtggagtgctggttttactgaggtggaggtgctgatggaaggatggtggtggacattccatagacaatgctgcacagcgaactctcaaaggttttctggagaatccataaataactgaatttggatttttcagaatttggcttcttcaaggataaaaatgtgcaaattacctctttgctagttgttagctaatcagtttacctaaaaaaaaaaagtgcaaaaataaaatcacctcgtccaaggcgatagttttttttttttctttccatcctcactctcttgaaaatcctgtttgtgcttctactctgagactcagtttaccatctgactccctccgagggagaagatcatttgcaggaaggataaccaaactacatggaaaatgaggattttcctctgggttcttctttgacggctggctctcaactccacattgtagactatggtgtaacacttatgtccaatattacacacacactttttcagtttcctgttttggtgacttttcatacatgccacttacacatgtctaaaggaagctctttcactgatgtctgtagccacctatggcacaaaaagccagggggtttgtcgcatgttattccatcaggtagagggaggagtttttccaggctaatgaaacatgatgatgctaaatggttagtgaagagtgatggagttagaaagcagttttcgtgtgtgatcagtcgttctgagcctgatggctctaccacgcctgctaaccacctcggttgacccggctgcaaccccactcggtccatcttttatttatctgatttcctcattagtccatggggtgtgttcctcgcaagcttgaattcttttcgcctcacctagctgcactaggggttgctcactttgtttttcctttccccgctcccaactatgtgcaggcatttgcagcaatttattagtttcaaataaatttgggtaatcttgcctgtgagtctcctttttgagattcattatgcatattaattttggaagatttccaaaaagtcctcaataaagaaacctgttttcatttggtttaacccagtggtttcccagtttgcaattctaccttcctctcacccccgcaggggcgcacacagggactcctgatgtctgaaggggcatggttagggaaactctgcctccacctacagagagaactccacgttccctctagccctagtcttggcttcccttcaagcccttgatttttttctttcttttattcatagtttttttgggggggtataatcaatattatgcatgttatctgtaaagtttacaattcagtgaacccctaactcttttaaaattgtggtaaaatagacataatgtaaatgtaccattttaacgacagttttgtggcattttgtccatacacggtattgtgtgaccttcactactgtctagccccaggacattttcattaccccagaggaaatcttgtacccattatcagtcatttctcctccctacccccagcccctgggaacccccattctatttcctgtttctatggattttgctactctaggtagcccatgtaagtgaaaccatacagtatttgtcctgttgtgtctggtttattttatgtagcatgtcttcaaggttcatccatgttggagcatgtgacagaatttccttgctttttagggcagaatagtatttcactgtgtgtatatatatagcattttgtttgtctattcatctaccagtgaacgctcgggttgttttcaccttttggctattgtgaataatgccactatgaatatggttgtacaaatatttgtttgagtctttgctttcatttcttttgggcatatgcatgggagtggaattgctggattatatagtaattctgttttaagttttttgaggagctgtgatatcattttccacactggctgcaccattttatattcccaccagcagagcacaggggttccagattttccagatttccttgccaacattcgttattttctgtttttttttctttttttcattaattgctatcctggtaggtgcgaagtgctgtctcattgtgactgagatttgcatttgccagtggttggtgatgttgagcatcttttcatgagcttattggccatctgtatatcttctttggagaatgtctattcaagtcctttgcccctttttaaactggcgtttttgttttttgttgttgacagactcctaattcttaacagatatgatgctctcactgtgatgaacttgacttctgggaagatactggctgcattcatttctcttctactttcctaggccaatcattattctccagcagtcatcatttcttacgttcctcgcttgtcctgttctcaggctggacctaagagctcattccctcccatctcttcccacattccatatcatggactttcttcttttcagctgttggtactgtggagggggggattttattgaagccaactgccatgatcaccttccttttccttcctaaaggattgtcatctgctttctgattttagccacagtagcttggctgaggttgcattttggaagttcgaggcttctggctcccagatttcctgtagaactgacactggtgactatcctttgttcttgaggctcctttgatctctgggacactttcctgtgatgccatgaaggggaacgagcaggaagtttagggtgcagactttggggtgcatcacctggcttcagatgctatctttgcccatgaactcactcttggtaaagtcaccctgtggggtttctccttagtgaaagagcacattaacacctaccttgcagctggtggtgaggattcattgggaaatcacatgaaaagtacttagaacagttgctggcagagaggaagtgttaacaaggtgccactgttggggcattaagctggttttgctcatgtattcagtcgatcccctttcacctccatttccccccaaccttttttttttctaaattctgttctttgctattcatttttctgctcctggacattttcccattctttccatttcaatattcctctttacacaggagattccaatcaagtcctctctctaccttttatttattcatttattacttatgtatgtttgtttatttaagatgtaagaaagcataaggtggagaggtgctaggatgtctaaatgctagaagatgatacatcttcctagctacttgacaggtagtcttttggactttaaacacactttaaaataagtgacgtacaagcaccactttaaaatactaaacattttcattttaaaccagcattactggtattataactatatgtacttctgcacatcagtgtaactgtacacagatttaagaggaaatgataggcatttatactagtcacaaaacaataaaaccagggatgaacactaagtttaataaagatcatttataattctaaccacttagaaataagaaaattaactatgaggtcaagggagaaattacgtgtgcaataacagattatttataaaacaaaaccaatgagaacactagacatgatagacaaagactttaaaatcgttattataaatacggtaagtaaattaggggaaatgatgaaccaaatgggtgaaaatatggagaaatcaacataaaaatgtaatctctttttaaagtttatctaaacttacggggtacacctgcaatttggttacatgcgtagattgtgtagtggtctagtcagggcccttagggtgggtatccatcacccgagtaacgtgtattgtacccgttaagtaatttctcatccatcccctcacccttccgagtctttgttatctctcattccactctctacatccgtgtgcacacgttttagcacccacttagggatactgtctcaacattttagtgggaggcttcttgtagcacaaaacggtgcctaaggacatatttcctggaggacgtttcgacctttgtcacatgactccatatcagctgccactggctcatacacaaccatgtcagtgctgtgtcagagatggaagaatttgacctttcaccagtttctgtgaaatacattgctttgaagatgaaatcacaaatgtcgtcctgtacaggggacctaatgggaccatgtcgagtgattatatcttgagcagatgtaagtctttagaatggtctagattatgacctgagtgcttactggtctctggattctatgaagtacttgtttgattttcacaagatctttaagaagtagttagtgctattctctcattttacttttccattcttatttttagagaaaatcaagtcttaagaggttaactgtgcccagagtcttgtaactaaaaagtggttgacttgagattccacccagttcccttggattccacatgcagaactcttaacatcctcttaacatcctttttttttttgagatggagtctcgctctgtcgcccaggttggagtgcagtggtgcctgatcttggcttactgcaacctctgcctcctgggttcaagcaattctccctgcctcagcctcctgagtagctgggtctacaggcccacgccactgcacccggctaatttccatatttttagtagagacgaggtttcaccatgttggccaggctggtctcgaactcctgatcttaagtgatctgcccgcctcagccctccaaagtgctgggattataggcgtgagccaccatgccgagccttaacatcttgattgtattctatacgtgccatttcacatggtctatttctcatttttcttgttcttttttcttttctatgttgattagatacactggagcttaatccattttagagtgtgagtgcatagtgcatatttatcagtaatattgttttaatatttgaattaattcaatcctgcttttaattttattattcctgctattttctataaaactttttataactttctgtaactttttagaatttgttttctaaattctttgagagcttagtctttttctttctttcataatgaacatgcttaaggctaaagctgcctctgaaagcaactttgaatgtgttaaaggaatcatatctagtgttcttattagttttgttttataaataatctgttattgcagatgtaatttttcctttgacctcatagttaattttctttaagtggttggaattttaaaatgaactttatcaaacttactgttaattcctggttttattgtttcgtgactagtataagtaggctatcatttttctcttaaatctgtgtacagttacactgatgtgcagaagcacatatagttataataccagtaatgctggtttaaaatgaaaatgtttagtatttaaaagtggtgcttataagtcacttattttagcataagtttgaattttttccaactgattttgaaaatttaaatagaatatatattctcaataaaatttttagagtaaatgactagttttggtttttgtgggaaaacggtcctagcgtattctctaacaaccaacactcaaagccagatacctgtgaaaaaactgacatgttttaaatggaacaggagacctctccaacaaacccatcaatgtttaacaatcttaatgagctttaaaaaagtgtcatattttagctgtgaatcacttcacgttaaaatctgtggttttcctgccaaagttatctttagtaaacgcgatgtattggcagctagatttggagtgaagtgaatgtgagtgaagctggaagcagattctgcaagaaacccaaatgttggaggggggttttccaagcgtcagagtcttaggtctctcaataccccctttgacactcgtggccacactcttccgccatgcccattacagtgactcactcggaactgcttgggaatcagtgacttgggtgagtgcaatatctctttcacatattgccggcttcctccatcaacccatagcatctgtgctgggtttatgctttcaagtgagaaatggtgaaatacacaaggggatggcttgcacttgactctgggatggtgtttgcatgtcagcgttttctttcacattaaattgagtggagctaaactcatttggtttcagtgaaggtagtttccatgcattcactgaaaagctgggattgctgagagtggtgaccagaagagagaaggccatggggaggtaaggtgaggcaggaatactagagggtggggcagggctcagctcagtggcgatgtttccccagcagccttcaggcctttcatcccatcatttctctcctctgataagtgtctctgctttaagagtgtttgccagacagaaataaaaatcgattgggggaaaaattatatggaaaaaaaattttcctttcaaaatattcctggagaggagaggaagcacgcatggatagaatgaatgaaatgttcttggggcacagtgccatctaatgttgctattattgcatttgctgcttagcaaagtacatagaaggcacattgcaaatattcaggtattagctgtgttaagtaattgttttcatgtagtaaatgtattagtttgcttgggctggcatagcaaagtagcacaaactgaaagccttaaataacaaaaacttatgatctcacagttctggaggctgaagtctgaaatgaaggtctcagcagggtgggttcttctgagggcgctgaaggagaatctgttaggtgcatctctccaggtttctgctggttaatggcaatatttgatgttctgtggcctgtggagcatctccctcatctccgccttcatcgttacttggtgttctctgtgtgtgcctgtctgtgtccaaatttcccctaattataaggacagcagggatattgtattaggggcccagcctacttcagtatgacctcttcttactgaattgtatctgcaaagatcctatttccaaataaggtcacattctgaggtaattggggttaggacttcagcacatgaattttaggggaacataaatcaacccataacagtaaagatctattaactcactttaggaagctgatatttatttaggaagtaaatgtttattgagcatctatgatgtgacatgcatgaggtattgagatttaaacagatacgcttaaatattttcctgtatccaagtcactttcagtaaagaagtagagagacataaattaataactagaatacggcagagctatatgaaggtatgcacgaggaatagtgctggtaccaagaaaggggatgctggtgaagcctactttttaggggagatgtcagggaaatgtcactgagggggctacatttgggctgcatatgaaagcattaagaggagctccagggcagtctggacagaaagcacagcgtggaggtctgacacgaaagggtgtgttcgcaggactttaagccatctcatatgggagtgtagtgtccactgggaggtgatggattgccactgtgaagtttcaagtgtcggagcggaactattggacttgtggttttgagaagttctgcctgacagcctggtggctggcatggagctgggctgtcaggtagctcttattttccatgtccattctgttctattctactagtaactgtctgtcttttccagcatttcccaagtcttcccttaccctttatggtgattctgcagaaggaacaagctggtaaaagcacttttgggagactggggaaaggaatacaaatattcctgtgttaactattttctggccccaagtaggctattggtgacctttggtatgttcagataagcagtgggaatggaggccggagtacagtgggttgaggttaattacgtgatggatgaagtggtgcgagtggtgagtacaggctgtctgttgcagaagcttgatttggaagggaaagaaaataagaggctgacaaggagacgccacgtaattgaggtagggtctgttgaatgttttttggggatgaaattttattttgtgttaacaaagtagaaatttacaaaggaaatggcccccattttaacagaaaaatcaataccatttgcatccctcattattaatatgcattggaacttcatccattggacctggtgaagaaggcagtcaccgtctcaccaggctggaagcctggatgttggaatgtggacatttcctactagagtggcttgaaaatcccctaggatcattctggtggtagggatgggggtataaatgtgggtgctccttgagaggaaggaatgagccaagagggatggagcccggggatgcagggagaaagtggcctttgttttatggttatgcactctatccagtttatatgtttcagatgatttattcaacaaacctttgtgtatctcttcctacttctttcccactgagctaggtaggtcctggggttcctgtgagtcctggggctgtagtcaggcagttgcaatatctcatcattctcatgctaattttttcctgacctgaagatttccattggaaaatgatgattgcactcttctaatagaaggctaagtgatttagatctgggggcagggaaatggtggctgtggttcttctagagggggaagaggatgtagacaggtagtttcatccaatgcatgagggccacaaaggtttctgtggacccctggtcttatactgcaatcccttggtaacaaggaaatcataaaactaggggtgactcatcaccactgtgatgaggtgtttctgagttcaaagggaagagtcagtttaactcagtgaaatggttattttttgtaatgacattcatttccttggttctttgcttatatgacacctggatgtacaagatggttaacagaatagtgctatggaggcactttgacaagtcctgaaccaccatctgggtgagaatatttgtaaccggcacaatacttatacatgaatggccactgtgaaatgggtttctaaggggcgatattataatttgctttcttaagagcactgactacaaagacatctcctaaactctttctttgtaaacttaccagaaacccttgtatccccatggatgaatccagagcttttcagtggctcaggtttctccttctaacagtgcttgaaattccttccacagagaatgaagcttttaattctagaaccaatgttcagattgtgcaaaggcatggatttaaggtgacagctattaacattggcaaagttctttctattgtgaaaattgctttcatatatatttggtttattttgccctccggacagtcctgggcttcattattgagtaacttattttctgtttgaagaaacggaggcttagtggtttaagaaagctgattaaagtcaaatggcaaggatggggtaaatgatggagctctaagcattgggtgttggcgtctgtaatatttgtgcatgactgactacacagctctccttctgagtcagtggcttttaagctctttggaaccacagtaaattccttttacctcatgactcagtacacacatatgacccaccaaacagtacttgccttgaccattccccatgccttctaatattttattctacccaattctgttttcttttcaacgtcgggtcttattaaattgacttggtgatgcactaatgggtcatgatgcagaatttgaaaaaattacactcagttccttccccaagaagtagaggaaggtcagaaatggaggatggtggggaaggaatggggtgtgtgtttttccagaatagggtgggagggaaatggcctctcacagcccacttgtcagaactgctcccatgtcccgatccgacttcagaggtgggaaaacgttgggagctggtgaggtgggtggggaaaatcactgtctgccacacctctcgtttctggcattcagtccacttttgtggccatcgtttgttgtgctggttggctcactctgcccaattcttccttctggttgccagttctcttcatatgtctactcttttactgcgggtcgctcacatctataaatgacggtctaggttgtacagtctcggaggttcaagtggagtcttttggcagctgtgcaggccagcatttgcatccctgcaggggctgcagggggccttaaccctccccgatcagtgcctggttctctgatcctggccaagcatattggttctcaaagtgttgcctggagtctggatgtgggaatctgcttcaggccaggccaggtgatcttgaacccgaggaacagaagtcatcacgtttgctctatgtctatcaggaaaacagctcaaagcacattccctattcatgtcggggcagtagaatcttcccattttcccagagacaacgcgtaatggcaggccagaggaagctctgtgatcaccctagagaggaaaacagcaggcgtaagaaagcatttgtcatctcaaggcagaaatcacccactttttacaagaatgtcccactgtgaaatcagaatgttctaccatgccatctgcaacaaaactgagggcccccgcaaagcccaccatccaaaagacatggtagcataagataaatggcaatgattgcaattaacaatggcagtctctcaagagtgggcatgcctgcgggacccgtgttgatatttggatttggatttttgcttgtttgtagattttggggtcatcttttgttagtgttgggaggtagctgtgtgtggtgaaatccgtggatttttcccacagctagaggaaataggaggttgagggcaagatgtgccatggagagtgaaggtgtgtgagtcaagggatgatcctatggtgggatgcctgcttctgagagtctcttctgccatattaacaaatcacggatgcgtttgagtttcctgtctggacacccatggtttgttattgtgtctgtactactttctgaatagggattatcttccatgctcttttttttgtttttttgacatggagttttgctcttgttgcccaggctggagtgcaatggtgcgatctcagctcactgcaacctctgcctcctgggttcaagcaattcttctgcctcagcctcccaagtagctgggattacaggcctgtgccaccacacccagctaattttgtatttttttagtaaagacagggttttgccatgttggtcaggctggtctcgaactcctgacctcaagtgatccacccacctcggcctcccaaactgttgggattacaggtgtgagccaccgcacctggcctcttccgtgctgttaatcctcacattcctatctcctgggaccaactggctaaatgctgggatctgtgtttattcacctccaattgtcagttctgtgcatgtgctcttagtttccttttccctcttctctgcatagcttttttattccctttgatactccaagattagaatctttgctagggccaggactatatcttttgcattctcttgtcccagcaactaagataggacattttatgttgtggaactgacaagtttctgaaatttccatccgtggacatgatccaccataaaccacagaagttaagtactggaatgtttactatcgggcaatttgctcattatctctaagcctcagtttctcatctttagagcagggatggtagtatcacatggaatcattgtgaagttaattgagaaaatgcatgtaaagaatttaatgcagtgcttgacacatagagacatcactccattattgatatactaacttcctcaagaaattaacagaatgaaccaggatcacaacagtgagaccatgctgtggcctggagagaaggtgtggaactgcagctgtgctgggaggggctgtgaggaaggagctgagcagagaaatgtgactttagccaggagaagccagggagggatcctgggaagagaaaccccgacgcctttccttgttgttgcttcccagtgaccaaatccaacccccctgttgttgcttcccaatgaccaaatccggaggacactggccaacaaggcagccccagatgatggcattcacaggagacaggctcctgtggcttagataaggactggcacatcttcttgaggggctgtgcacacaccttattgttgcccacgaattccctgttttccacgagtccttggcctgaccagtgcttccttctgtacaggattgcaggatcctgggactggaaaggatcctgtgatcactctcctcacccagtctcttcatacggagggaagatcaaggttgtctcctgtgtggctttggtggcggtcaaatggggttctttttattggtgttgccagagtctgctggggagcagagcacacagagcatgctcagaacgtggtggtggaagggatccgctgtttctcatgacttttagcctttacagcggcaccatgtttttacactgagccatgtgttgtctttctcattcatgggactgtttcttgcaagtgtcttcctcttagtgtctgtgtttttggagggaccctgcccttgagaacaggggacctgtgctgtgctcctcttgatcccctgggacatttactattagggccgagcacacggggccagcacatactttctgaattaaatttcacaaggattacctggaaagctgtgacgttttccgagtcctaaaacagaggagcactgttggttcctcccttttcctttctaggggcattgtggcagatgtctgttcctgcacttgcagctccatgagaggagaaaagcccccttcctcccagcagggccattgccactctgatgggcattacagggaatcctaaagatggaggatctgtgtgcgttccctctctggagggtagagaccaggcattgcatgccaaagcccatcaggtacgaggtaacacccagtccaacccttgctggcatgaaaccactgtgtaaactcttgtcatgtcagtcagctaaggcttacgacgttttcaactgaaaaatctttgctgcttccctgttgtatgcggaaacagctgcctgggtgtttgtcagtcctgctgtgttctgtgtgtcccagtgtccttgatggctaccccgcccagggcttctttcctgggaacacctagcaggactgctcccagctgtggttgcagagacaaaaggaacaaaggccattgattgattaacttgccaccagggaacccacctgccgtggcttttcttgcagcaggattcagaggtgctagagagacaatggtttttctagagtcaaaagggaatacttgacaagtcttctcttaaggtgtcagttttagaagcaaggagacttaattggtcttagggtacattgggcagtccatggtttggctgcaagggagcaagtgagccctttggggacattttgaaagaggaaggattatttactgttaggggcggggagcaggaagctttctgtggctggatgttttctggagcaagtcagggtcagggtgttgccttttgggtccacttgtcataatgtccttgccacaccgggccatttctcacttttatgtctgtttgatacggaagaggggaagagaagtgctggcaagggaagggcacggtccctttaaatgatactgaagggggaagggcgtggtccctggttagggctccatccctaggcctgtgcccacgaacctaggtgaggacaggcatttttgttttcctgcccaaatgttgcatttcccaagaccaccctggcctgccacacccccatactgtgcctgtaaaaaccccaagaccctagcaggcagacacacaggtggcgggacgtcgagaggagcacatcagcggaggaacacatgggcggctggacgtcaagagaaaagcacagacaggcactgacaggcaccagcaggctgcaggccaccgactggcagaaggatgcggaggcgggctagggcagtcgggggagagcccaggccgttgagcagcctgactccaggggaaaaccatctccctcctggctcccccatctgctgagagtttcttccattcaataaaaccttgcactcattctccaagcccacatgtgatctgattcttcaggtacagcaaggcaagaaccccgggatacagaaagccctctgtccttgagataaggcaggggtctaactgagctaacacaagctgcctacggatggctaaactaaaagaacaccctggaacacacgcccactggggccgcagcagtaaacattcacccctagacactgccgtggggtcagagccccacagcctgcccgtctttatgctcccctagaggtttgagcagcggggcatggaagaagcgagtcactcccccatcacacgccctgggaggaggacaagggaacttcttctgtttcatgttgacacagaggtggagtgtgtgactaggagagggattgtgtttgcgagaagtgagcgataggtggattgcatgctgactgaagccagtttcccgtgtacagctcttcaatcttaacagtagatgacaaaactgctaatgggacattgggctgggtggacctctttcccacagcctcgctcccatattaccacgaaaggaaggtccacgttaatttctgccatgtagacggaagccacttattaaactaacagaacaggtcatactccatggagtttgtaggtgaggtgccacctctcttcttttaggtcacctgactttgcctagcatgaaagataagttgtaacatgttccagaattgtgattctgtttcccttgcaagcagcttcaggcatctggctctttctttctttctttctttctttctttctttctttctttctttctttctttctttctttccttccttccttccttccttccttccttccttccttccttccttctttctttttctttctttctttctttctttctttctttctttctttctttctttctttctttttttctttctctctctctctctctttctttctttctttttttttgacagagactccctctgtcacccaggctagagtgcagtggcgcgatctctgctcactgcaacctccacctcctgggttcaagcaattctcctgcctcagcctcctgagtagctgggattacaggcgggtgccaccacgcctggctaatttttgtatttttagtagagatggggtttcaccatattggtcaggctggtcttgaactcctgacctcatgatccacctgcctcggcctcccaaagcgctgggattacaggggtgaaccactgcgcccagcccagcacgcatctggcattttctaagtcactggcccctgcatcctgtagctctcctagcggctaatctgaaactatgggatgcagggcttgttagagcctcctctcttcatgcacgtgaagagaatgtctataaagggctaaataacaagctgtcaatcaataactgtaaaatgtaaatgatgtaactgtaaaatgtaaataaataactgtaaaatgtacctggagggctcattagcaagcctctggcgtggacaaggatacctgaagctcctgtagttgctgccatggtagagggtgggggtgggctttaaaacggtgttattcccatttgatagatgaggaaagcggaggtctgagaaggtaaataactcgcctgagctctcactcttagtgacaggcagaaacagccttgcaaccaggctgcctgtgtttgattcaaacccactgtggagcacatgctttgaaccaccgaccatgactctaggtggtgggcggtgtcttgtggttgataagcagggtcccaccagccctgcgcctcctgtcttggttggcttgtcaccctagagagtggctgcttaggagcctagttgcatccttccctgctcctgagacccctttctccctcatgctccctggttcagaccctcttccccaggtcaacagttgctctcgccccatgggtgagaagtccagctcttttcaggatctatgtgtctcaacataggaaaacaccttaagagtacctgtaaggcagtcagtatttgggcctatccttaaaagttctcagacacgtttcgaaggaattaaacaattatttgcccagcctgtactgaacttcaaaactatgaggtcttgtaaaaatgaattatttgatgataaagtggattccatcaagaaagatgaaatccattctatttttttttttttgagaatgaagacagttttaatattgcctttccaacctggatgctttttttgtttgtttttcaagacagagtcttgctctggttggagtacagtgctatgatcatggctcactgtagccttgacctcctgggatcaagcgatcctcctgcctcagccccctgagtagctggaacaatgggcacatgccaccatgcctggctattttttctattttttgtagagatggagtctcactatgttgcccaggctggtgtcgtctcgaactcctgggctcaagcgatctacctgcttcaggctcccagagtgctgggattataggtgtgaaccactgcacccagctgcattcttatttccttttcttgtggtgttgaatggtgaagacttccagtataatatagtggtgagaacagatatttcaaggttggaagatgccaaaaagtagtttgccatttgtaaagaaagttcgggatattagctagagttatgcactactacaaacatgataaatctcacattactaaaaacatgaagttaaaatccatagcagttgtattttagcttccgacactacagaactgtgtttatgcctgggatttccacagttaaactggttttatgaaaataagtgtcagtgatgtctctttaaagcattaaaataaataaaaaaattttaaaagctgaaatgtgatatgaaattgatgccctaaattcttactctaactttgtttactagaatattagcattatggaatttagatgaaaaaaaagttcttaaaattaagctagtcttatagtccatgtaatgcttgaattccctttaccgcgttttttaatatcttcatggtaaataattaactattttctggaatagctcattccacctttagattttactaattgtttgcataaccattgttaagtcttcgattgaatctgatctcagtattttctacccactggttcttgttctagtcttttctttctctgagacatgttttctaaatgttaagcattataagtgacattgaaaattcttcatattccatcatataattcttcatatattctatcatataatacatgctctctttctcctggtctctctcttctgaatgtcattcaggcttataagtccctggtaaaagtgagacatgtaaaactaactgtccaggagtttttttgattcatgttctaaacgctatgctttgatagccagactaagaggacttttgctgttttggtagcaaatcccacagcttcaagtagaattaatgatctccattttacatatgaaaagtaaagaggcaccagttctttacaacagcataccagcttgacttgtctgtcctgtagtaccttgctccgtaactgttgctttccgtaggaaaatcttccctataacaggctacaagcttcaagcttaaataattaatttctcctttggctagttttccatcacgtccattcattcatcaagtgtacattgcacttggattcatgggctctgagctaggcacgagaattattaattgaagaaagcaaaggtcagcttcagagatgttcataaaatagtgtcctttatattacagtgtaatgactgctataaagaagcatatataaagttagtaataaatggtaataaattactgatctctgctctggggaaaccgagaggatgggacatttcatttgaagaatgtaggaatggctgagctgagaaggcatggaagggcattggagacccagggacctgcatagacaaagcagttgaggtacggtaacttaaggagttacacacattgaggttcctcttcttatatacctcctatctggattttcaagtttcttttttgtttgtttgtttttggatgtttctgtttgctctgtctctttctttggaaagtacttgtaggatcagctgtttttgaagacgttagaaaatacagacaagaacattttcctcactttttaaaatggattaacatatggaggaagtgggataattttgattttgtcttagtcaaaatagcctattttaaatattttgttggctgggcatggtggctcacgcctgtaatcccagcacattgggaggctgaggcaggatcatggctggaagccaggagttagagaacagactgggcaacataacgagactcccattgccacaaaaaaaaaaaaaaaaaagaaaagaaaagaaagctgggcatggtggtgtgtgccttcgatcccagctacttgggaggctgaggcaggaggattgcttgagcccgagaggtcaaggctgcagtgagccaagatcgtggcactgcactccagcctgggcgaaagagtgagaacttgtctcaaaaaaaaaaaaatttttgtaaatgttctttactaatgggatagacacagtggggaggggtagcttgagtctgttacatgaatgaaatggaatgagtactaaactggactcaatggggccattggcgagggccttgtggagatgctgacggagatgggcagcatcgcaggattgaaaagcccatcagtgcagtttcatgttggtgaaaataaaagcctgggccgggcacagtggctcacgcctgtaatcccagccacttgggaggctgaggcaggagagtcacttggacctgggaggtggaggctgcagtgagccaagattgcgccactgcactccagcctgggcaacagagcgagactctagctcaaaaaaaaaaaaaaaagaaaaagaaaagcaaagcctgtgtgaaaagccttagcattagctctcctggcagcaacagctgccttgcctgcctctgctttcgcagctgttttatgtaggtgacaggcggacaggagaacaattgagctttttcttctggttgaatttgcgtttcctctttcatttgtgggttattgtttgaaaagaagtgtacccacattctctgctctgtcagcatcttccttcccaagttttgaagcatgccacagattgctaggagacagctgaaatttttaaagctttttattatgtgtgcttaaagaggggggagagatgctccttgatgagggaaaggtgcttagcatttggcaagaggagatcatgccttctctccctaccttcccgcagctcctcgaggctggtgtgcagggggagtatgagttttgcctgctcccctctgtggcttattttgtagtaaaatcttgcgttcttgtggaagtgattgacactgatagttctgtcaatcaaggaaaatgaccaaagaaagtctcaatcatttcaggaggtttacttgctaaagttaaggatgggcgcctgggagacaggtctatgcctttctcctaagatgattttgaggtctttagtatttacaggggaaagggcaggatattaagaaataggcaattttcatgtgagaggtgggtaaatggtcattcatgcctttgtctggctcggtgaatctgcatttgtacataaggtaacgtagacagtagggcagaggaaacaatcagatatgcatttgtttcaggtaggcagagaaacgactttgagttctgtcctacgtccccaacacctgtgaagataaggtatttgtttacattaccatgttgaactttaacagaaatgctgtagggtaaaaagcttgggactcacaaggagtttccttgtgggcaaaatatgagggaggtatgtagcttttcatctttgtcgccattttatttaggaacccaaatgggaggcaggcttgcatgacccagctgccagcttcactcttccctttggcttagtgagtctggggtcccaagatttattttcctctcacagttccattgcaaaaagtgcgaagttcacagtgatgggaaacatagagaaggtacagcttcagcggcttacagaaccattgtctgaccttcgaaacgatggcgtgtatccctagagagagtgaaggaatgtcttgtgttcttgttatgcacaaggagggaaagggagctagtatttattaaactcctactgtgtgccatgaatgctttcatttaattctcacatcaaccttcagattgggcattgtgaccttttaaaaatgagagcttgggttgggagagaaaaaatgatttgctaagattatccaggagtgactggaagaccccagcactggcctccccagggtcacaggcttctacctccccaccatgctgcactgactgtcttggggggatggatgtgtgttgactggctcacccccctttcttctcactcttcttatactgccaggggtgggttgtgttgtcagatgattggcccaaattatgatgcagtcataatcaagagcatgagccccagggaatggaggcgtcaggcatgacctggttagcaacgtgctccctaagtcatggctggaagacaccacgtatttctctgctggcctgtatctactcaccctgctgctgacatccctattgtgtccaaaatcacactttcctgaccgttcccggagtcttacttggtaaccacaggcagcgggcatataaaggcacagttgccctcttcctaccatgaggtttggtccaggatcagagacaactttctcagctgatgtttttgttttcttttctccttttctgggaatctgaccctcaggtctcgccctgagtgtgcaagcttttctttgcctttggagggaggcaggaaattctcctatcctggtggactcagccagagatggcttctttttcttaagttcttccttatcagaattttcccagcaggaggtaggggttcatgatggatgcgttggtttcctcacatctggaaaataaccagtggggactgccccagcagtggtttggtgtgtgtggagcctctctgtggctgacaccacgtggtgtctccccatttcacatctgtgtgaggtggcttggacacactgaggtgctggagaccagcagcacctcctggactagctcctgccagagtctctgctggctaagaggcaaattggggggagtcatactggacttggaatagagacctgttgtccctgttccagttgggacaacctttgagaaacaccacaccccaagggcaggcagtggtcaaaaggggagaataattcactgtcagcatccctgttagccaaactgtcccgacccggggcagatcgctttgttagtataatagtttttactctgttaaacaaaggtccccacattaaaacctgttctcagtgaaatgttaggctcggacactgatcccgcagccgccctctgcctcccagcacaggtgggatatctcggatgcatttattctctccccttgcacggctggagtaaagtgcttatgaaaacatctcttttattgattctacatgctttttaaaattccattttcaagatcgagaacagagaatgcgtggtgcgaccgaaggtctcctgctggtgtggaaaggtggcaggctgcctctgcagctttgcccggaagctggtgccccggactactgcttctcaacactcctgaggagttgcctttggctgtaatcacccaccggcctcctctgtatgaacagcacgggtgaaactcttgatgttacttcttcctccattgaataagccagattctctttcttctgaggaataattgaagtcttttgcagtgtacgtaagcaaaattacctaacgctcttaaatttttcatacaacagtttcatctggaagagaggccattgaaaccaagcatttgtgttcaagtaagaaaatgtatccaagtcacaaagaaacataatttggcttttggagacatgagcagcttcatttctcatttgttcattcgaaagtctccactgggcttctgagtgccacatcctgtccagaatgatgaaagatacagaaaatggtgcctgctgaccttctggagttattggctagtaagaaaggtgggtggtattccaaggtttgtaccaagaattaataaaatacaatcccaataattaaagtgatacagtacaaaatggggtgctgtgagtagtgaataaggaaatgaggattaaaggtaaggaagagttagctgagcagagagagaaagaggaaagcaaaactgggaaagagcaggagggtcaagaactgaaagggggttgggtgcagtggctcatggctctattttcagcactttgggagacggaggtaggtggatcccttgaactcagaagttcgagaccagcctgggtaatatagcaaaaccccatctctagaaaaaatacaaaaattccctgggtgtggtggtgcatgcctgtagtcccagctacttgggaggctgagacaggaggatcgcttaaccctgggaggtggaggtggcagtgaaccaagatggcgcctccgcactccagcctgggtgacagagtgagaccctgtctcaaaaaagcaaaacaaaaaaaaccaaaaactccacacagctgaaagggaacaaggatgtcctgatggccgagaggcagaggaagtcccttggaacaacaggacattgccagccaactgaaggagtctttggttctcaccttgaggacggccaaacttgtttgtcaagaacaaattctcaagccttgtagagttaagatggcttcgtgtagcacaattaaatctgagcgctggaaattgcttccattgcctgtggtttagggtgcctcatataaattgaaatccagcaggccagtttctagaatgatcatactcccttgttttaattaattaattaagtttttggttctcgggcctcagtctcctgagtggctgggattacaggtgtgtgccaccatgcccggggaatttttgtattttttgtagagacagggtttcaccttgctggccacgctggtccacgctggtctttaactcctgagctcaagcgatccactgacttcagcctcccaagtgctgggattatgggcgtgagtcaccatgtccggccccttgtttaaagtcttcctcttccttccccaaccctttgtctgtggtttgcatgctgaattcctatcactgtcaaattcttcatggagaccttactcaagcagcctagagtctatggctttaccattagggcaacaagcttccagaataatctgggagaagatgttctttgggagaaagcacttgtctttgttttcaaggtgttttatatggggttaaagataccatcctcctgttatctcactagatgtagacagttaaaaagcttttacaaaattttcggaattttctaatgtggttggttgcacagaataattggcagccctattaatgatgttctgatgatcctcttttgctatggtattaatttgtttagtttagttttgggtcagaagaaagacctcattgctttgattcttagcttattgtgtaatcaaatcttactttttaaaaaaaagtccattgtagattggccttcctgaatctatagacaacatatttgacactgtggacgaaattgttcaaataaaatcattcagtgttatttgggttattaatcagaaaagaatgcatcagatttaaaagaattgggttataaaaatattgactgtgcttttggctgcttagagatttggagctgcaagtaaaggtacttaagttaaaaaaaaaatagagcttcagcaggcggtagattgtagagtgaggggaggggacaggacagagcctgaatgggggccagaccctcctagcatgtgcaccttctctttctcactgtcctgagtctgagtcccaaggccaggtgaggtcgtcttctctatgtttaggagagaataagagtctagggggttaagtgatgcttcctagcatgaagcacagtggataggttggaagagagcagcacttccctctggttgtgcattctgggggacaagtttggccctccatgcagttgagggaaatctgaggagacccccatggccactccccatgaccagtgccatgctgtatacagcaggtgctcaataaacgctgggagatgatctttgctatggactgaattgtgtctccttacaattcctgtgttgaaggcctcacccccaaagggatggtgattggagaggaggacattgggagctgagtaggttcagtgaggtcccgagggtggagcgctcgtgatgagatgagcgtccctgtagaaagaggcaccagggctgtctctgccgttgtggggacacaacaggaagccgaccatctgcaagccaggaggaggccctcgccagaacccggctgtgctgggaccctgatcttagactcctgtctccagtaccatgagaaaagacatttctgatctttaagccacccagtgtgtggcattttgtcgtggctgcccgaggtgactaagacaatccttaaaatgccttccagctctaaattcatcagtcctgagaccagtgatcatgtgtacaaatccctgtggcttttctccccagtcacttgattgattggaggcttctctgttgtattgatgaatgggacagagaggccctgctggactctagactcatgggcccgtaaaaccctgagaaggaccatgggccccctgatgtgcttggccagagcccagactgctcatttgctcctctaggccattctgagctgccctgcctgcctccagcctcctttctcagctttccctctgcacaccgtgctgtttctggaacccacaggcccttccggattccctgcctctgcctgccagcctccctggccaggtctccctgaatatccacaggcaggacctctgttctctcccctgccccgttaaagaaaagccagagctggaggtaggaggtgaagacagtttctattcaggaactattgcagtaggggaaagagacctcagtatagagccgggcttaattctgaatacagcatggacaagtggggaggtgcagcccagaaacagggtggaaggctcagtgggtggaaagttactaagaggagaccccaggggcgagggggattctggctaaacccaccttgctggaggcagaccagggtgaccagacatcaagggtgggggacgaggaaccgatcagatagtgacgttggggatctggaggcagagtccaaggtggccagacactgagggtagaagacaaggaactgatcagatagtgatggtgtgggatcctggcaaaaccaactttgcaggattcttgctaaaactgggcagtgcagagacagacatggaaatgtaaaggtggaggcctggttgggatgaggatccagaggcacccaactggagtctctgccagacctcacgcaccaccctgctgtgtcagatcccagttactgcttggctcatgctgtgaatcctgaaccccgcaaagatttgtcgtctttgtcgtggaacccccagcacctggacccctgcctgccccaggggaggtgatcagaagaggcttcccgaggcagtggaagggcctgggatgaaggtgcagggctctgcttctccactgagagacaaaataaaataaatacaggtgatttctcttggtagccaagtcacaagttctactcctgtgggtcagggccccctcctcaaaaattcctttgttaaagtcctgcctcagaatgtgaccttatttgtaggtgacagctgcaggtgacacgagagcccttccaacagggcgtgttcctgccttcactggtcagctgcaaaaggcgggcacaggctgctcctgaggctgtgtggccagggcaatacctcacggagcttcctgtggccacagcagcagcagcatctgtgagcttgaaaggggatgatgagtgagacttttgtccacagttcttggttgagctgccacaagcagatgggaaaggctgagaaagaaaccattcctccctgggtggggacgcttgaaattccctttcaaccaaggggacgccacaagcaccccgttcatacctgcgtgcagatgccagcgcctggctcgttggtgaccagcaagggtcccagctgagccggggtgctctcctgtggctctggtggaacgtccacaggatactggagagatgattcaaacatcatttagatgggggagccgttgaaatagacttgacagtttgttttgcttagtagaaaaaaattaaaaaattgtcagctactatcaccatttttaaaataagattaaaaaatgtattttacaaaaaaaaaaaggtaaaaatgagcagctcaccatgtcccacttcttccaccccagcgccaacaccctcactcagccgtggtccagccagaagacaaggtcagataaaacaaccataaagaaaaaaaaaaccttcttctagagtggctgggaatgaggtcaccgtgatgtcttcccctgaatcggtgccatcgtggttttgaagtgtgacggtcactcagctcaggagtcctcgctatgtgagcctgtccaccactattcacccttggtggaagaagaccctgagcaccccaaaacatgacatccttattttcaggaacctctaactgaaattgagcccttcctttctttatgaatataggcactgtcttagttccctgcggctgtggtaacaaagcgcctcaaactgggtggcttaaaacacagacatttgctgtctcagggctctggaggctggaagtctgagaccagagtgtcactggggttggttcttctgaggctgtcagggagaatctactccaggccctcccgcaggctctgggagtggctggctgcctttggcattccttggctgggagacacaaagccttgagccctgccttcctcttcacactgtgttttctctgtttgtgagtctgtgtccaaatttccctggagaaatacccatcatatgggttagggatcccccaatgacctcactgaaacttaatgtggagcctgtctccaaataaggtcacattctgaggtattggtggtgaggactttaacatgggagttttttgggaggaggccctcacccacagtagtagaacttgtgactttgtcaccaaaagaaatcacttattttcacatcgcaccgtagtagcagtggacatctccaaataccggcgaagctagtcctgcctgcaaagttaaggcagttttttttatcagatctagagctggaaatcattgttaaatgaggcgatgaggaagtgtgtatattattctggctcacttttaaaaatattttgatccatttatttcaacataattgatttcccctgtgattctgtatgttttgtattatacatgtaaaaacgttattcagaggagttcacaggcttcacccgactgtgttgaaaggacccatgatgtaaggatgtttgttgtggggggtgcttgtggctccttaactggctctggaaagagcctacttcccatagtgaaccctgtgaggtccaattctgttcctccccctggagctccaagagaaggtcattgtccttgtagcagcaggtgcccccccaagctgggttctcactgcaggtgccagcgggctctcagtaggtatgacctggatgtgagtggtgagccaggattgaggcactcagcaccttcgaccacacttcccactctccctggggttcaagtcaggctatggaaagtgtacaccctgtttgtcatataactggatgggtggtgggcagaacgcctctggcaaggtagaccttgaaggcaaaactgagttgaggtttgttaggacggaaataattactgctgggcatgcagcacttcccaaccgttctgtgaggcaggcagtgttattgccagtttggcacaagggcacaggtgtagaacacgtaagtgccctgggccgtgctacaccaccactgtgtttgagctgagatgtgaaccagggccttctgattccaaattcctcattcctttcatcctagcaggctgcctgcggttagcagaaggggactcctgtatctgctctgcagcttcttcagctgatttataatggaaaacagagtagatattgatttggcaattagtgaaatattatgagaatcatcatagcaaacttcacagtttgatcaaggatcctgccttcaatatctggccaactgatgtgtaaaagcagctgcaagaacttcagagctgacaaaaaaagcaaactccagactttatttcctggaatctgttttgtgagacactggcccatgaaatgctctcccagaaatagtcggatttgtggtcaaataaatttgggcaattctacagaacatgtgtctttttcagagatttatttttaattaaacttatttaaaaatattaacatggtacaatttgcatatagtgaagtgtgcaaatcttcgctacatggctcaatgagtttttacatatatttccacccatgtaatcaccaccgagatctagaatagaatgtattcgtctctccagaggttcctctgttcccttgcagtcaataattctccaccaaagataaacattctgctgacttccttcatcattgataagtttttcctggttttgaacttcatataaatggaatcatttcatgtctagctcttttcactcaacataacatctgtcagattaatacatcgcatgtcaatagtttgtagtttttatggctgtgtagcatttcattcattcattctgctgttgatggaaatttcttgactagagttgtgttatcaatttattgcctcttggctccaaattcaccctttttgcctggtctctggaaatgggtctgggccctctaaatattttccctttgcaatctggctcttgaagcttatcagtggagggtcctggaggggcattgcaggggaaacagtttttccttcctggttcagggacgctggtttggtagcccctgtggtgttacaggagtacttggcaagacagcagtttccccgggtacacccgctaggtgttttgtagcagagtgcatctgtgagacaactggtgaactgctttccttgcaacctagagggcagatttctggcaagttccagagggtggattccaaacatgttcctctaatgtggatctgcagtgatgtctctgccattcagtgggcatagctgtgcccttttagtggggtctagatctcagccctgggattgggggcattttctcagttgctcaatctcagccctaggggcagtgaccattccttatatatggttgtttgtatattctttggaactgtcttgattttattactgttagtctctcattactccactcccttattatagtaaatgattctttgtatttgactttccctggtcaaggtactaagtggtttttctctcctgtttggatctagattgatacaataattttttgcaattatgagcaatgctgctgtgaacattcttgatcatgtcttagtggacataagcaataattgctgctgggtctgtgtgcaggaatgatttgctagatcatagcacatacgtttatctgtagcagaaactgccaaggtatatacagctttccaaagtgtgttaatttacatgcctgctagcaaggtaggagaaatacagttgcttcccaagtagctgggattacaggtgtgtgccaccactcctggctaattttttgtagagatagggttttgccatgttggccaggctagtcttgaactgctggcctcaagtgatctgcctgccttgggctcccaaagtgctaggattacagggatgagccaccatggtcgacttcatgataaaacttcagtggatgaggagctgcctcttatgatgaacaaagaaggtggtttcttgaaatggaatctactcctggtgaagatgctgtgaacattgttgaaatgacaagaaagaatttacagtgttacatagagttagttgatgaagcagtagcaggattcgagaggatcgattccaatttcaaaataagttcttctgtgggtaaaatgctatcaaatggcgtcgcatgctacagagaaatctatcatgaaaggaagagtcaattgatgtggcaaacttcattgttgtcgtattttaagaaattgtcacgaccaccccaaccttcaacaaccatgaccctgatcagtcaggagccatccacattgaggcgagaacctccagcagtaaaaagattatgattctctaaaggatcagatgaacattagcatttttttaagcaataaagtatttttacgtaagatatgtatgttattttttaggcataatgctattatgcatttaatagactccagtatattgtaaacataactttaaatgcactgggagataaaagtatttgctcttttatgatatttgctttattgcagtagtctgtaatggaaactacattatctcttgggtacacctgtatacagaaagaaatttatcatgaggaaatgctcatgcaatgatggaggctggaaagtcccaagatctgcagtcagcaagttggagacccatgagagtcgatggtgtggccccagtctgtgtttgaaggcctgagaaccaggagagccaaaagctggcaagctctggacccaggaagagctgatgtttcagttcaagtccgaaggcaggaaaagactgaaggcccagctccaggcagtcaggcaggagaactttccttttactcacgagagggtcagcattttgttctgttcaggctgtcaactgagtgacccagaaaagctggcacataacattcaccatcgtgctgcaagagctgcaaaaccctctctgcttctaacactgatgctcagcccacctccagtgggcagggagctgggtgccgggaggacttggggttgccagcccagtgtgggcctggacagttgctgagaatctccctccgccctgtgacttcttaattacttagagggtcaccctggttgctcacttcagctcacttgggagattctctctgcttgaggccaggggtaggtccaggtctgatggggtctgaagcttatacaattggggtggggggcattcctctttaaggaaaagaaaacagcagaggtgagtcgtcctgcagcttagcttcactagtctcgtggaaaatttgcctcctaaaatgtctttcctctgagaaagcccaggcctccaaaggcccagccaggctggcgtcagtctggggtcagctgcggggaggctccaggccatgtgtgacacgggagtttaccccatcccagtttccagtggagaagcatcgttctcgtccacccccgtcatgctcttttccaccttctccaggggaagggatattttcagtctgtacaacgaatccactgaaatgttaaggtgggcacagtggtctggggtcttcgaccttgtttatacgtggtgcctgttactggtcgggtctgtacaggcagtttccactggcgttttttaccaggccagcctagagtagaatgaccgcatgttaaaatatagattcctgggccccagacctgccagaatctctgtgagatggaacctttcaacctgggttttaaacaagcctcccgggtgattctgacactcactggatttgagaaccgtggggttgttcagacagcagggacgttgatgttgttccttctgcgttcctggtgatgctgttctgttctcccaaggcctatgcggtggtgagaatctccaaggatacaagacagtgatctggagcgagtgtcctgaaagcagactctagcactcaggactgccaacaccctccccgggtttccttggtctggaattcccatcccctggttccacctgttacatcacacctccccttcaaggaccagtgcagatgccacgtccttcacggggctcagaatgctcaccagcttcctctccaccgagggccacagcccctggagaccccttgagctgagtgctttgtccttgcatactctttctggcctcatagtggggcttggccattgtcccttcactccagatctctcctttcaggtccaggaagtgcatcttgaacttaactttccagacccccccttcagttttccagtccttagagaggtggacttctgattcctttgtctctgtgccctgtagcctcaggtcaggcttaaggcaaggtctcctcacctggcctggggagagtcccaggacgctgcacgtgcctgtgcgggtaggatgctgatgcccagatttcccgttagagagcctttccctatcctgacggctctagctttgtgtgttacttacttgttccactttaattcaaaatgtacccagcaaccagcttgtgcacagttctctggggtttcaggagggatgtaagacataccccttgcccttcaggcactatggccagaaggggggcagtgacctaggcagagggcgggagccagcagatgggatacactcagaggagcctgcagcaggcagaggcagaggagaagggaggtctacacgttctgcactgtatttatctccttcagttccaaggttctctcctggcatctatattgctcatgagttacagagcaaagcctggtgtgatggttacttttaggtgtcaacttggctggattaataaatacctagagaactggtaaagcattatttctgggtgtgtttgtgaaggtgtttccagaggagattggctgtgagtcagtgggctgagtggggaggagctgccctccatgtgggcaggcaccatccattgactgggcccagatagaacaagaaggcagaagaaatgtgaattcctctttctctgctggagctgggatattcttcttctcctgcccttggacatcagagctgcaggctctctggcctttggacccgaggatttataccaagcaggtttctgggttctcaggcctttggccttggactgatagttacaccattggcatatctggttctgaggctcttggtcttggactgagccacactcctggcatcccagcgtctccagcttgcatggcctgtcacggtatttcccaacctccgtaatcacgctagccaattcttctaagaaatttcttctcatctatctgtctgtctatctatctatctgtctacctaccgacttacctacctacctgcctatctatcttttgattaatctacctatcaatctttctatctatccataacctgttgattcgatctctctagagaaccctgactaatacacctggagtgcagaatctgctggagaaactgccattccgttattgactggctggtcaggccatacagcctggtggtctagatgtgtttggaggtagggcttctgtagcacagatagtgcctgttcatggctctgtcccaggtaaggcagagctagcttgtgctgagggcttctgctttgcagctggcctggggtggctaggatctggggacacaggctgccctttccaggctctgtctgctggtgctgcaggtgcccctacctcctccttcagtggaaggctggcccccaggtcctctttaggcccaatacagactcagccaaagatgcagatgtctcatatatgaggattctgagctgtgacttctggtggtaactccactttaggcaggaaaaatgttcaactgcccatgaaaacaaatgaccccgggtcatttgggtttggcacctgctctgccagttgggtttggcacctgctctgcctcctgggaaacagtttggccaatgcactgcatgaggtgagcgcccatccctgggaatttagagccctgtgaagggtcctgaggagaggcacatcagagagaatgagaatttaaggtttactgttaaagcaacccatagaaaaggagcagaattattcaagcaaggaaacaaagtagaaaaatatcttctttcccttgcacttggtttttatgtttctctctaaaatgtattgtgggggagaaagcagtcccccaacccccctaatcagctgcatatcttagccatgcaaataaataatgaaagagagaaagaaggagagaaagagaaagaaaagtaaaggaaggaaggagagaaggaaggaaagaaagaaaagaaagaaagaaactttgcagcatcctggagcaccagttcagacaagttctggtctcctgcttgccttctgctgtgatttctctgaagttgctgggggcaggagctgggcaggaactccccaggggtgccaagcagagcaggtagttggctaagtttgcctccaggaaagaagtccctggagagcgagctggttctagaaagctccattattatattcctattgcttttggcgaatatatgtagaacagaattttgacaatgaaattttcaggtgctcttttggccatcaaaataaccagctcttggctgggcacagtggcttgcccttgtaattccagtgttttgggaggccaaggcaggggactgcgtgagcccaggagtttgagactagcctgggcaacatagtgaaaccccatctctacaaaaaatacaaagttagaagagtatggtggcatgcgcctgtggtcacagctacttgggaagctgtgacccaagtcacaggaggatcgcttgagcccaggagttcagggctgtagtgagctatgattgtgctactgtgctccagcctgggagacagagtgacatcaggtctctgaaatattaaaattaaaaagcccaaaccaactctgcttttcactctttcagtttcatttcttgctgtcctctctgtcctctcacccagggtaacatttttaaagtgccgctattgtgttaagaattggatttattctctgtgttaaattctctcagcattaactacagactctgttatgtaaataaggtaaattatcaggatgagaagtgagactctaatttatgagtttatcatgtctctttaaaaagctgctaggtgctatcctaacttattaggcttgaaggattctgggggattggcatattgttactgttgtggactttgtttgccttgatcatacccattttacagatgagaaaagtgaggctgggattggggctcaaatgcgtgctcagagtcacataagtaggttggaaggtgacgctacagacacggtaaattgtgaaggcctgctggtaaggcacgagtgatttgaatgacactctttttttttttttcctagtgattcctgtcagaatcaccatttttggtaaacaaaccaagcccagaacctgataattatggagcattctacactgacagttctttgagacaaatttcctcttggcatttacactgtggctttagctttcaaaccagaggttcctcttacccagcaaaaagtgagttatacgctttcttaatgttataacgttaccatggatgatcctgaacttgccgaggatagcagagacgggtgggcagaacaggaaagaatcagatcagagactgtaaaaagtaacttaaaaaaaaataattctggcagagacagaatttgaaggtacttgtgcacatcagaacactggacttgcttttttctgggagcaggaatgctgcttaattagatcagagaagaatgcaagtggtccatacatttagatctacaatgcgtggtttccagacctgcagcttgttttgctgcgcttcatcatggagtcatagaagggcagagctggaggaccgagtgagggacctggtgccatatccctacagacaggcaattggagactcccgtaggttaagggctgcagagcctggaccaatgcccagaatctctgagctttttatcttacaccatgaagtgacagatgctggcagatgttagacctttgtgcttaactgtttaaccacacagcacccgacttctgtatgcagcgaggttctagagtttccaaaacacgggtctcctctcccacctcagcctcctagcataaaactagacacatcctcatgcttttgaggtctaatcattggattttgttcctttcagatggctttcccgaagatgagattgatgtatatttgccttctggttctgggggctctttgtttgtattttagcatgtacagtctaaatcctttcaaagaacagtcctttgtttacaagaaagacgggaacttccttaagctcccagatacagactgcaggcagacacctcccttcctcgtcctgctggtgacctcatcccacaaacagttggctgagcgcatggccatccggcagacgtgggggaaagagaggatggtgaagggaaagcagctgaagacattcttcctcctggggaccaccagcagtgcagcggaaacgaaagaggtggaccaggagagccagcgacacggggacattatccagaaggatttcctagacgtctattacaatctgaccctgaagaccatgatgggcatagaatgggtccatcgcttttgtcctcaggcggcgtttgtgatgaaaacagactcagacatgttcatcaatgttgactatctgactgaactgcttctgaagaaaaacagaacaaccaggtttttcactggcttcttgaaactcaatgagtttcccatcaggcagccattcagcaagtggtttgtcagtaaatctgaatatccgtgggacaggtacccaccattctgctccggcaccggctacgtgttttctggcgacgtggcgagtcaggtgtacaatgtctccaagagcgtcccatacattaaactggaagacgtgtttgtggggctctgcctcgaaaggctgaacatcagattggaggagctccactcccagccgaccttttttccagggggcttacgcttctccgtatgcctcttcaggaggatcgtggcctgccacttcatcaagcctcggactctcttggactactggcaggctctagagaattcccggggggaagattgtccgcctgtctgaggggagcccagaggcacatccggacaagtttcagataacccgtggggatagtttttgctagattttggaagagggggcgggacagaggatgctgttcttcagtgctgaaatccacgccagaatgtcggtgttcatgaagtcactgattagttcccacttggtgccccaggcaataataggcccgtctcttgggcacgcacactcttcatactaagtgtttgacatacacctggatttttgcatttcaggggtcagtatcctatgacatgatgggtgttaccatcctaattttacaggcaaggacacagcagctgcgagaggtacagaaacttgtcccaaggctcacagccagtaggcataggagcgggaatgaaaatcgagcactgtcagaatctggtgggcagcccctgacttgaaccactcccacgtgctgcctcccttaggaggggacactgatgatgaggtctcggagccggcatccttccatccctgtcgagtcccctccacctcagctcccagtccttgtgctttttggagctaagcctgggatgaccaaattcaccccagctccttcattcacagggctggatgtagctgggattgagtccatgttatcggctcggtactcaacacaacccaagtttcatccgaggaaatgtccccgcagtggatgcagctcacatgctgaggaacacccagctctggacagagttcttataaatgtataaattaggctcagaaaccactgcattctgacctgctgtacagactgcccacactgctgacctgcctagcgagcaggacatcccttctgagccatctgctgctctctcatttcatcaccccaactgtcccttgtttttgatcaatggggaccagccactgccccaggagcactttagggctctcagttcaaactgaaggacagttgaactcagatggggttcatgtgggattctgggagctttctgggaattcagttggagtcaagtcaggatgctctcaaggacccctcgggctcagagccctaaagtgggccctggtgaagcagggtggtcctgcgtccacttcccaagcctgagccaagctcatcttcattgaatgtctcatttggccgaggaacaactgaactttgtggtttgctgtttagccttcagtttgctccgctgcctcctacccagaggtttgtgcgagcctgtgttgcagggttgtataaaaccaaggtacttcgttagttttgcccattcagccatggtcacgtgacatgcaaagtaatcttgctcctaattatagaaatgatttttcttttaattttttactttaccagactttactttgtactcagagaagaggcctcacatggctgtgtcacatataaatgttggactaaactcttacttgaactcaggaaaagttacttgctgcaaaatggttttgaccatgttcaattgcaaaagtacgtctgatatcctattttgcataccatttcttgtgtttggattaagctgcttctttgtagatgtgtttcctcatcctggctgctctgaacgcactgggtcatgttcagaaaagcctccttctcaggtggaaaaaatcagggactgagcttgtcttttgaagcccaaatttaagagccacgcctctcggttccataggatgggccgcctctcattctgaagatgactgtgctttgagggagaagtcgtctgtttggcagtaggcctgcgtctgtgtttcgtggtctaccttgtcaggtgtgtgtctgtgtggccactggtctcagtcggcgaggccggtccagctgctgcctctgtgtgactggctttgggtctggccttcacagcatcagctcacagcccacagctccagggacaaatgaggacaggcgtgggctctccctactgcttctgtgtgttcttaaaggattttctttgagacccattgtttcccctcccctcccctcccctcccatccccttccctcttcttttcttttctttttttctgacagggtctcaccctgtcacccaagctggagcgtagtggcctgatctcgctgcagccttgaactcaacgagcctcaaacgagcctcctgcctcagccagtgggtagttgggattacaggtgtgtatttctttatacaatgaataattctttttcttgaggaaaaaacattatttcatgaatctagaacttgaaggaaccttagagctcattcaatcctgcctcctcttttatgtgggatgcaaacgaggctcagagagacgtaacaacttgcccaggaccttcccagcttgtttgttgcagaaggagggttccagctcagcgtgggtttcctggtgctgtcttgtctggatgtgagagtgagaaacaatgtgaaagcatgagtgaggaggccaagcagtgcttccccaggaacacccagcgctagctccagagtgggaatggagaggtccaggttggccgggccggggcttcaccgcaggcacccagagaggaaggattccgatgggcaggtgctgagctaggggctgtgtaggtattgcctcatctacatgctctcaatgagttttccgggggcagagacctgcagttgctcaggtttacagattaggaaactgaggcagagagagagagggtgaacaactcattcaaggttacataggtgaaaagtggtggaaacggggtgaccctaagctgccctgtggcctccccagccacctgctgacggagctgtgggagcacattgcattggctgctcccactgcctctctggggtgcctcctcagactcccccaaccatacacgcctacacccagcccccaaacctccgtactctgccttctactgtgactgtggcagaagccacttggcccccgtggtgccagaacccctggtattggactgactccagctcttcttccacagctcctgatgtggcctcactctcgtcctaccacctgctgtcccctctgctggatcaccccattagcacacagacacgctgccattttccacctgaccagaaatggccaccaccttccccgaccccttccctgacccccttccccgtcccgctgccccatcctgttgcgtttctggtggaaccccgcacgagagttttacttgtctgttgcctcgtcctaatccttcccttctttcccaaatgccgtctcatcagacttctgcacccccactccacccacatggcccttctcagggcacccaccaccccctgtggctgggtcctgtgggcagttcttgttctcctcctgcttgacgtggcgagtcctcatcaccagcttccaggacaccgggtgctcttggtctccctcctccttgctgctcgccttttccatctcccctgcttgctccttctctttgctctgacagtgtcgtgctggaggatcctgggctctgcgtggggccccctttcttccctggttatacccagtcctccgaggggcccaccttgtctcatggctttaaatatgttgatgatgtttccatttatctccagcctagaactctttcttgctcttcaatccactgcctacctgatttcccatagtgaacaatccaacactgaccttctggttaactgccccacatccagcccatctgcagccattcccgtctcaggtaatggccactccatcttcctgcagctcaagtgggaagccctggagccattccgactcctctcccatctggtgcatcaggaaagactgtgggaactaccttcaaattctctccaggagccaaccacctcctgcccctccactgcgaccacccttgttcaagcctgcattgcctctcacctgcattcgtgcagctacctccagaccctccctcagcttccattattgcatcctttggtctcttcccagcagcatccagagtgatcctttgaaaatctcatttctctgctcaaaaccctcctgaggtttcccatcaccaaggatattaaggataaaaaccacatccttcataccattgtctacctgtgattccctaatcgtgtccctttgctcactccctctggcctcttgctgttccctgaacagcagtctgttccagccacagcagcccctttgccctatgtgcccatccccgtcagccttggcactggctgtcctctctgctgggagtgccctttcttcagatgctctcatgcttcgcttctttgccttgttgacatttggtcaatgtcaccttctcagtgaggcctaccctgacctccctgtaggaaaatgcaactcacctcactcccatgccccgtaccttatattgttttccttgcacttaccaatttctaacaaagcatgtaatatctgtttattataacatatctatattttatggtttatgtttcacgcaacttgaatgtaacctttgtgtgggccgtgggtctttctctgtttccttcactgacgcaccttggattcttagcatggtcccagcacatagtagatgctcaataaacatttgttgagtggaactgaatgtattggtatggtaggtgggttttagaagggaatgggtgaaccaggactgaaaaaaaagaaatatttttcaaagtaagccaacactgtggtttcacttgagtcagtaagtaggaaatgggtgcgactctgtgacctgaaaacctagaaatgctccacagccatgctcttcaccccttttcttccaaaacggaaaacctcacacaatgcagggtggacagaatcacacggtgcagtctgtgcgcctgtcctccagcccgacacctggccagtcctgtctcatctacactgtcatgcaaactcttgtttttgtttgtttgtttttgagacagagtctcactctgtcacctaggctgaagtgcagtggtgcagtcttggatcactgcaacctccacctcctgggttcttgtgcctcagcctcccgagtagctaggattataggcatgcaccaccaaccagctaatttttgtattgttagtagagacggggtttcaccatgttggccaggctggtcttgagctcctgacctcaggtaatctacgtgcctcagcctcccagagtgctgggattataggtgtgagccaccacacccagccatgtttcaagaatttgtgcttcagctcagcacttagtggcagtgggaagaccagacctcctgacccttcagcctgctggcatccaccatgccttaaaaaacaaaacaaaaccctaaatgtatttaattcctgctcctcttcaaacacaccattgtaaccacataatacactgtgtgaaaagagaggaaagaaaaatccaagtcaacaataacttgccaggccttctttccttgagccccatatcccacgcccgctgtgctaacctctggcttgccgcccacacctgtctggattcatcccgactcgagccacctcctcctaactggtcccacgggcctgtccctgccactttccaatctgtcctccacttgacatttggagtaattttttaaaacagcaaatctgattaggaaactcagaggcccagggaagccagtgacttgccctctggcaccctgtcctgagggtagagcttcctggcacagggtcagtgagccccgaggccacctccctggaggctgcaggagggtgagcgtggtcaagagcagcaattttcattgtttcatgtgtcattgcctatttaacgagcttcgcagtgccctcaatttgctaagttaactttggccacgccgtccgtgagaggtcagactggtgatttccaactcccgccgggcaccgggtgctgcaccggttatcccaacaggctggcacagagggctgaaatggacttggaaagccaaataattaattttcatgcgagtttttgatccccttgagtgtggttatttttgtgcaaaaaattatcccgatgtttactttggtttcataagtaatttattaaaattccttcctaagctttaaatttcagctaacaaatatgagcatggcctctgggaatggtaagaacaaggaagcattgtgtgtgtgtgtgcacaccccaaggttgtgcagctagaagtgcagaatgtggattccgtccgctctttagggcacagctagccctgtgcacctgtagaaactgtactgacgtacagccttgcagagcctccagcttccatggtggcaggagccatggaaaatagagacccacccggtaaggaggtaactgggacaccaggttactgtctacctggtggggaagctggggaaaagggcccatgggaggatactaactggggaagaggagaccttgcttccagggctgggcgacccacttacggaggccccattccatttacatctccgctcaagcctccgcctccgggttccagccctggctctgcaatttgctagctgtggccccaggtggtcattctctctgcacctcagtctctgcatctctataaaatgggatgataatagtgttcacctcagaaggttgtcagaggtgtggaaattaagataattcacattgagttcttggcacggctgtgcctagcactgggtgcaggctgaatgcatgggctgctatcgcgatgttgtatctaatggcctgcagtggttgcttagcagcaatgggtttgcttggttatttcctgatttggggtaaatagatccagagaccaaggctccatgttatccccagcaccgggctgaccccaagtaccagagaggtctccatggccccaggctgcagaggacccaggttacaacttgctcaagtagacccaggatctaggcttatcctagtagatcttggtaccaggccagcctctgtgacctgagactccaagaccaccattgcagacccaggctctaagctagcctctgcaaactcaggatatatattccaaatatccctgatttggggggcaaggtctgtgtgtgatttgcagagtaacgatatgaagaaggaggtcttgttaagatggcgtggtgtggagtgcccaggtgtgaaatggttgtctcaatggaagttgtagcctcctcctcccatgacatcatcctcacacgtgctcagtgttaggcattttttccccctcctgctctgaatcaatgcgagtgagatatgcatgcgggagggacaagcttgcatggcacccagctgtggtacatttagaactcggcctcagccctccagtgtgaccttgggcatacccttcacccccgggctctgttcgctggggcagggtctgcgctctggagtcaggctgcctgggtttgaattttaccttcctcgccaagtcccttgagtggcaagttacttatcttctcattgtctccgttttgttatctgaagaatgggaccatagtagttcccgcctcatgggatgatcatgtgggttaaatgagaggatgagtataaactgctcaacatcccatggtaggtgctcagtaaatgcaggtgcttatgattatagtcagtgtttgggctgtgaattttggtggattctatggtggtgtatacagcactatctatcagtgtacctgtcagtgtctggtgatctctgtgcaaatcaaaaactcttcagattgagtctgtagggctttgtttcagctcttgttctttttcttcatttgaatctttcctggaactcttggagaagttcttctgttcgtgacattcttcacaatcagagcactgtgttcttgaccctcttaattcagaatatgtgaaaatctgaatgaggtaaaagaagttggagctggaagatgccttagaaattatctacagtatttttttttttaagataaaaccttttacagttaggaaagccaaagctcagaaaaatggagtgactttgccaggtccttcagcgagtggcacatccaggattaaaagctggcatcagaaatcccatgtcagacattcattcgtttatttattcatctgttgagtgctcagtgctttgaccgggcatcctgaatgagggtcaagctgaggttcgaggccgtgggttttgcatacagagctttcactgggtaaatacacaatgctgagaagattatcaggggcacctgatcccttgacagctgaataaagaagcgttccagtgccttctctgtgggcatcgtaagccatgtccatccatacctgctgtttcactgaaaccccacagcagcctctggagggcaccattcttataattatgcccctggatttaagaggaggaaactgaggggcaggtgactcagtgacttccccgggggctcagacgtggtggagacacaggccctcggcctccaaatgctgcctcccgcgagcagccttgcttttctccacttggcacagtggtgagtcctccgatgtatctgctttcataggaagcttgggaccagccctgcccaaggagtgtgccacctgaccccttttcctgtcttctgtcacttttttttttccaagtgttgatatgagtttcagtctgccccttcctgggcctgtttgacctcctgggattcggcacttagttatctgtgtcattcccaaggacctcccgtttagctggatcccctgacctgtcctgccctggccagccctctcttgaggttactcaagtgtccaatggcagcccaaacaaatgtctggcttcagaaaataaactcttcagtccagcccactttccctgtctccctatctaatgcccttgcaaaacaagcccgggggcgccacactcagactgtgtgtgtgtgtgtgtgtgtgtgtatctatgagagagagagagacagacagacagatctgaggctctaattagagataccatgctcagtggaagctggttctgaacaatgttaactgccccacccgtgtccatgaagggcagtggaagagcaaggggcggtttaattacctgggatgtaaaacagcaggcacccccactgccctcctcagctgttggggtggcagggtggagttgagggcctcactcgttttcacctttgcacaatcagtcacacatttgttatatgacagctatgtgccacacacccatgttcagtaaggtggaagccagctgcaggcgtggtccacagttccagacatctctgaaggatgtgacaccaactttcaggcagaacatttagaaagagtgaaataaagtgaaacagatcaaccagcctattgagtatctacgtgttttttttacaggcaagaactgaggaggcaatactatttagaatccttgataaacagttccaaaagaaaaaaaaaaacaggctttggtgactctcatgggccctccgtgccaagagtctatggctctgtgatatattaaatcaggcttgttaattatttaatctaacagctgccatgcaccctcattttaaaaacagatgaggcaatgtttacattttctccatgtcctccatttggaagtgtcttagtttgttttgtgttgctgtaacagaataccacagactgggcgatttatagacaatagaaattaatctggctcatggttctagaggctaggaagtccaagagcttggcactggcctctggtgagggccttcatgctgtgtcattgtgggcaaaagagcaaaacttgctttgataaaatcactcttggcaataactgaccctcctcttataataacattaattcattcatgacagcagaaccctcctgacccagtcacctcttaaaaggtcccacctctcaacgctgttgcactggggattaagtttccttacacatgcactttgggggacacattcaaactgtagcaggaattatttgctttctcataacatttttttaattaattaattttcagcgtttgttatatcagaatggacattatagcaatttccatggctgtgtcgctcctggcagattttaaagttcttccagcctgattcctctctctgtttgggtctctggcatggtgcctgctggagagtagatacttgataattatctattgggttctcaggggatctctcaaaggtggtattcaggcacccacaaggcaactcccatcacaagaaagaatggtggcctgggagtgagctgtaaggttccttcaaacatcagttcctgaagcctcttttattcattattgttgggacttgtttttatttctgtttcgttctacgtgaccccaaaatctgtatgtgaacactaggaactttatcatgggctgaggtgtatttgaagtaaactcttaactatgtctctgggatatgaaaggtgcttacattctctgttgggaatgtagagagaaggatttgcagtgtgtggcccctgggaatgtagaggcatgaatttctgtctgttttcctgctgttgaaatctgagtgctaggaacggacctcttgctctcagattggccttgaagctgaagggaacctgtccaccctctgcacagggcaagagccacgccaacaggaggaagttggagtgcatcctggcacctgccaatcggaagactgacaaacaaaaaattagtttttaattaatttaaaaaatgatcttcctacttatcagacacaatcacttttaaatatgagcagaaaaacgaactccatagccaaatgcaacattttgtgtcatactgctttacatcatctattctacctccattcactggtcaaagaagcgcagagttaagttggccagtgtggcgtggacacagccaggcgcagaccctcctgccagcgaagccagcgtgaggtctgttggctcaggggtccagtccctgggtccccgaagaggtaagccaaagacatagtgatacttggttcaattcggctccagagagtatcagatgggaaatagatgacttgttttacctggtcaaataagacatcactaaaatctaccatgactggaaattacttaatgcaaccagaggagacttcgcagtcaaattttgcttttcctaaaagacacgaaattaaatttacatgtcactgaatgctatttgaaactgtcatttccttgtatattagggggatctgctagactcttatgtcattgtattttggaaatgggtatatgtccttattattggttaataatcatatttatttttaatgaaaattaaattatgaaaataatgcacttaactaggtgagttttaggttgtcgattgatgtgataattcactcttcccgaaaaattggcaaggtaatggtctgaatcggacaatccttttgtttttacattgatgttttctatatttattttgtacctggaaaaatatttttacaatttattttgattttatatgtgtagaaaaatgtactgaacaatgttgacatgcttatttttgtaagagatgggtacttcttgttccccttggatttcggaagcaaagcaatgggaccctacgcttcagagtcttaatggggtggggcagtgtccattgaggtgtcctgtcgggaatgacaagtccagggcagattatgaggcaggcatcctttggagttcttctctcaggtatattttaactaaaagctatcatttaagttgaagaaatcaagtcttgtgaattgatacgattgtacttctagagtctttgatgataagttgtctttgcggtacagattggctcctcgatctttcaaagtgtcatttaaatggaaataaatgtctgaaacagatgtgtgtttctgacttaatcatgcatgggtcaccgttcctgcagtactgcaggcctggaaatctctgcccaccgatgctcctggcaggctgcatccaggacccgctcagaaacgaatctggagttggaggcggcagggagggaggggtgcagcactgtgtgtggggaagtggtggatcctgaaggtgggcggggggtggtgcagcttcagaggatgagggtccctcctgctccctccccaccagccggccttgccatccccctgtggcaaggtgggggctgtccctggaccctggaaggctggtcctttctcgctggctgctccctcctccgggactccatgcccaccatcatctcctctcccacaatggccacttctcccttccagaaccttcctcagcacacaagcctgctctcactgcccactcaaagatgacttgctggactttccccttttctagtagtgcctttctctctcttttttcccttaaggctaaagctcctcccaagagtggccttcccctctgctgccacctcagctcccctctcctttcccccaccatggccctgaattagctgttgcggccgcaccagcacttgggttgggtcagcaccgtgtcactctgggcgcttgcctggccaggtcttggcagtgcctggcactggagcctgccctgctccctcccgcaccctcctggctccaggacatctcagcctgttgcctttcctcccctcccagcagctccctccactctttttggctcactccacctccttgtcccgccctctcatggtggagggccctggctgagaccccaggcctcccgctcgccatcagtactgcctgccagtcagagcacctgtctccccatgtgttcgtttgtctcagggccatggaaacagaacacaagccatccagctggaaagaaacgcaacaggtgtttctcttcccgtcgtcttggaggccaggtgtccaagataaaggtgtcgtcagggctggctcctcctgaggcctctctccttggggtgtggatggcgccttcctcctgtctctgcacatggcctctcctttgtgtgtgtctgtctccatttccttttatattttataaggacaccagtcacattggatctgggcccaccctcttgacctcattttaacttgattacctctttagagaccccgtctctggctactggaggttggaacatcagcagatgaatttttttgacaggggtcatgattcaacctgtaacatcatgggtttcaattccatctctatgttgatggctcccaaatatgggtcatgacctctgacttttcactgaaccccaaacccagatattccagttcctgttcagcagcatcactttgatgtaaaatgggcaaagctgaactctcacttttccccttcagactggcctctctgctatctcagtatttctgctgccagtgcctcacgctcaggagtttgctttggctcctgtctttcctgaacatcctgcagcagcaggtcccgagcctcctcaggggagaagagcctaaatcgggccgttttcactgccctcagccccccacccaggccgctgtcatccgtcacctacacttctgcgggggtctcccagtgagctccctgtgcgttctttgacatgtgtgtggcctcatctacacagagtggtctctgaaatgcatgaataagatcgtggaccactgctgctcattgttctagaagtttttatttaccttcaatgtgactgtgaagtccttaccatgactcacaagatgacctctggctcctgaatgcccctgcaactccccaccatgccctgcctttcacccctgggccagcacacggtccttgcactttcctccaggcagcccagccccttcagccccgtcagtgtcacgtgtttccccaggaccttcccgtgggtgcctctcatgccataacagggcaccacagacgagtcggcttcaacaacagacctcggttctctcacagtcctggaggctggcgtcccagatcaagccgtcacagggctggttcctcctgagacccctctcctgggcttgcagatgacatcttccccttgtgtcctcatggggccatccttctttgtctgtgtcctcatctcctgtccttacaaggacacctgtctgatagggtcagggcccaacctgacgacctcattttaccttgattacttctttaaatgcccgatgtccaaatacagtcacattctgaggtgctgggggtcaggacttcaacatatggatcttggggggattcaagtccactgctaacaccgcccccccctctgtgagtacctcttgcaccctcgccttgttccttcagtgtgctctattttcttcatgtcactcatccctgcccacattttactggacacttatgcatctcttgtctctccctatggactgtaagctccatgagtgcaaacactgccttcctgcccacactccacggcatttacacggcatttacagcggcgcctcccacccagcaatccatttttctgaacaaatggatgagcctgtggtttgaaggacttgagtctgagagcgtttgactttaggagctggagggtgggtctgtgactgcactggcgaggactacctggtggaggggctgctgagtgggcccagccaggagagggtgtaaggaaagagggcagcggtacctgcctcccgtcacgcagtgtcttggaagaatgaatgtggggacgtatttcatttcatgccatttgaatagctactagaattatccccactttacaacagacacaagtggcctgcattagattattaaggacgccaaaggagaaataaaccgtgacatcagccattccctctacatggcctgatgactttctctagccatacagcataatgatcgaacaaagaaatgccctcattgtcatgaggtccttatgcaattgtgctatcctgtgaagaaccaccaggtaggtacaggaaggaatcactttggcagaaaaccgcaagacaacacacttctgactgtctttaggtttctaggtaattgcggtttgcatgttcagacttacagcgcctctgaaccacgacgaaacattcttttcgtcaggcatccgtggccaggaacattgtctctggcaggcctctcccagctctcagatgacagatgcgtctgtttattctctggttgtttgaacagtgctgcggccctgcaggcttttctggggcactgtcctttgtcagtgcagatggagactggagctcaacaattagattcccttcagtgatgagaacctggctgcacttcagttcagagaatatttctgatcagtgcttttagcagcgatgctttgggtaatgcttgctcatctcaggaaagaaacaagagcgtcagacaggggaggaaccctggagatcccctggcccaacctctctattgtacagaggacgaaaagcactcacagctgccttgtccacaggaaacggtgtcagaaacaaagccttcctactcatgtctctgtaattttagctgtttctagatattgaatgccacaataaatagcacgtaagatgttacattgaaaaacaaaaccttggccaggcgcggtggctcacgcctgtaatcccagcacttgggaggccgaggcgggcggatcacctgaggtcagaagttcgagaccagcctggccaacatggtgaaactcagtctctaccaaaaatacaaaaattagccgggtatgatggtgcatgcctgtgatcctagctactcgggaggctgaggcagaagaatcacttaaacccgggaggcggaggttacagtgagctgagatcgcaccactgcactccagcctgggcaacagagtgagactctgtctcgaaaaaagaaacaacaacaaaatcctttctgtgttatttgctgatcctgccatatgtcagagaagaccgtagttaagactgtatataagagcagagaaaaccattctatccagaggctcagaaagtttacttttttgcccaagtcatacagctagaaattgaccctggagttttaacttcaactttactgcattacagcctagaattcaaaaatagacccaaaggtgtacatcttaaaggaggcacgctgtaattctatgctcagacttccagtcgcgtactgacttgcacttgctaagcattcatcaacgcattttagttggatgcctatcatgcatcacagctcctggtgtcatgaacttcttttctgtttaagaaagtggtttgtaaacaggcctttacaatgccacgtgatattgccgggtgcaagtgggtgcacacagagagggcaccgacaatgttttttgtttgtttgtttgtttttgagacagaatcttgctctatcccccaggctggagtgcaatggtgcgatcttggctcacttcaatctctgcctcccaggttcaagtgattctcctgcctcagcctcccaagtagctgggactacaggcacgtgccactgtgcctggctaatttttgtacttttagtggagacggggtttcgccatgttggccaggctggtctcgaactcctgacctcagatgatccacccacctcggcctcccaaagtgctgggattaaagaaatgagtcaccccccaggcctccaacagtgttcttgagaggccaggaaagctttccagagaaagtgaagtctaacctgaaacctaagtaagacctagtcacatgggaggagaagggggctccatggagagaggccagcgtgtgaaaagaagcaagggggtggggagctgaagcagggggcgggggaaggcatgaggttcaacacagcaggagcactgagtccaaagtggtaggatgcagagatgaggcctgttgtggactgaatgtgcccctctcagattcgtatgttgaagccctaatcagtagtgtaatggtattaggagatggggcctttgggagttaattcagttatgggggtggagccctcataaatgcaataggtgcctttataagaagaaacgcaagagaaatgacctctctccctgccatatgagggcagggcaagaaggccaaaaaggtgactatctgcaaaccaggaagagtggggaccatggcatgctatagagaatactaaggacacagggcaaaaaatctggtggcagaaatccaggctgcaaactgactattggttttagtcttagctctggacctcgcactttaagcaagagacttagtctctctaagactgggtgtctacaaatttttttttttttaatcagcaaaataaagataactatcctttccttaccattcacccagcgatactgttgtcccataaaaccacctgtgcataaaaaagaaaagcatccctttcttctggctcttcagctgggtgtccttgggaaggggacctcctgcatgagcttcagtgatggctgcatgagttagctaatgctatgtaatgaattaccactccagtagctgaaaccaacatttatcattgcagaatttctttgagactctaggcatggttagctgggtgtctctggcacggggtttttcacaaggctgcagacaaagtgttggctggtggctcatctgaaggcttgactggggatgggtcctcttcccagcacacccagtgttgttggcaggacttagttctgtattagttgtctctctctaccagagagagacagcaccagcaggagatgtatttctatccatatctgtatttgtagctctacctcgatgtctttattgcaaggaattggcttgtgcaattatagttattggcctgacaggtctgaaacccacagggcaggccatcaggaagggcaggctggaatcctttcgatgctgcagtctgcaggtagaatttcttatttctcaaaggagctgcaattctgttttttaagaacttctggttgattggcttaggcccacccacattatccaggataacctctcttgtataaagtcaactgattgtagatgttaaccacatctacagaatagcttcacagcaacacttaagctagggtcatatcaaatcatggggactgtagcctggccataaggacacaccagcctgatcattacaagttcgtttctttgcgggtgtgaaactgagggtctcagttccttactggctgtcaacagagtccaccctcagttccctgtcaggtagctccccacactcagctcacaacacagcaggtggtgagtccatgcaaggcccacatcacaatcttctgtagcctgaccatgtaagatgcaatgacctcttgtttctcttgttggattctgttcattagaagtaaatctcctggtcccacccctactcagggggacaggtttgcttcagggccgtgagtagaagtctgcaatcacagtggccctactcagtcatttctggggaaagtatctgagatgatatgtgtgaaataattgtgtgagcctgtatgtaaatattagctagaaccacaggaaattgtttatttttcacctacaaaaatggctcacctaatgtaaatgattatagtaacataggggactgagagggcataaaacgactttataatattgggggggaccaggcaagaatgaaatcttggctaaatggcaactaaaacagacagaacctggggatagacaggggggagagagagagagagagagagagagagagagagagagagagagagagagagagagagagagaaggaggtgctgctgatcgtagtaggtttgcattgggcttatttttctttctatatattgtctatcatctatctatctattttctatctatctatcatctatctatctatcatctatctatcatctatcatctatctatctatcatctacctatcatctatctatctatcaatcatctatctatcatctatctatatctatctatcatctatgtatctatcatctatctatcatctatctatcatctatcttcatcatcatcatctatgtgttatctatcttcatcatcatctatgtgttatctatcttcatcatcatcatctatgtgtcatctatctatctgcctaccaatctatctaatctgtcttgtcatctatcatctatgtattaatctattacgcattttgtactggtcagatgcaaggctttatttgagcctacagtcatgcaccatgtaacaatgttttgatcacgatgaactgcctatatgatggtggttccataagattataatgtagctgaaaaattcccatggcctagtgacatcatagctgttgtaacattgtagctcactgagtttgtggtgatgctggtgtaacctgctgggctgctggttgtataaaagtctagcacacacaattatgtaagatatataatacttgctaatgataataaacagcgatattactggtttatatatttactacgctatactttttatctcttagagtgtactcttttacttatattaagaaaggtaacgataaaacagcctcaggcaggtccttcaggaggtatccagaagaaggcattgttatcatcggagatggctgctccatgccagtgggacaagatgtgcaggtggaagacagtgatatggatgattctgaccttgtgtaggcctaggctaatgtgtatgtttgagtcttcgtttttaacaaaaaatttaaaaagtaaaaaagcaaaattaaaaattaataatttgggaggccaaggcaggtagatcacgaggtcaggagatcgagaccatcctggctaacacggtgaaaccctgtctctactaaaaatacaaaaaattagccgggtgtggtggcatgcgcctgtagtcccagctactcgggaggctgaggcaggagaatttcttgaacccgggagttggaggttgcagtgagccgagatcacgccactgcactccagcctgggtgacagagtgagactctgtctcaaaaaataaaaaataaaaaaataaaaatataaaaggcttatagaataaagatataaagaaagaatatatttttgcatttctgtatatgttttatgttttaagctaagtgttattacgaatgattcaaaaagttaaaaaattaaaaagcttatatagtaaaaatgttacagcaagcaggggtgaatttattactgaagaaagaaaaatatttttataagtttagggtaggctaagtgtaagtacactctatgatgttctcacgacaaaattgcctaagaacacatttctttgaatatgtccctgttgttatgcaacacgactctatttacaatgcaacacaaggccagtgctttagaaatgttttgtctgtaccttgagaaatgaatttgttctacatttgtagcacactgcctgtgagataatagtggtgattgtgtaattcaaaaatgactacccgtagatggtacaaaggaatgagttggatagacgagttagaatctaaacctctctgagaacatcttgttttgtaaatttgactttgtaacaatatgaatatttttatgattatacaccaaaataaaaaagtaatttccaaagtttattgaaaaaaacaaaataaaacaaatgaacttcgctgtgtattgactttgtagtatggtaacatatggtttcacagtatttcaagtgactttaaaacatggtaccttgcctaccctcagtaggataaaccctaaaaacaaaaagaatggcaaaaaaaaaaatactttaaactcctttcagggatcttgtctgtggtggtagagttgatgtggtcattcctagacaattatatctgtaatgtgaaatgaagcaagtgagtaattacattgagaaccagaatgttcagtgttgctgagaggagatgcgaatgtaagatctatgaggttaaataaacactctgttgctccgaacttgatttggcaatatcaagctacactcatgatgtaatttctttctgtcttaaaaacatttccttatttttgtctaggctacaggactagagacaatgaataatccttcagcaatgaagactctcactgtccatattgtgctaaaaaaaaaaaaaaaacccacaaacaaaacacacaatctagagatccttgaaaaaatggctgatttcagaattgaggtagaaattgtagaagataagcttgaaatatgttatcctaccagaaagcaggcaagccagcaagcactatgggatcatgtcacaaagactcaggagcctgtagtctatataacaagcctgtagtctcattacaattagttgtaataagaataattagactaggtgtggtggctcatgcctgtaatcccaacaatttgggagcccaaggcaggaggatcacttgagtctgggggttcaagaccagcctaggcaatgtagtgagaccccaattctacaaaaataaaaaaaaaattagcccaggatggtggcatgcagctgtggtcccagctacttgaaaggctgaggcaggaagctcacttgagcctgacaggtcaaggctgcagtgagccatgattgggccacggtactctatgctgggcagcagagtaagaccctgtctcaaaaacaaacaaacaaacaaacaaacaaacatcactgcattggaatcccattagttgtctaatgatactaaaacacacacacacatcagtcatatttagaaaatatcaggggaccaattcactatttttggaagtataaacaaagagaaagggtataacatgtatcctgatttttctgtataaaatatactgcatatcaggggttggagaaccagagcttgagagtcaaattgggcctgctgctctgtttttgtgaataaagttttattggaacacagtgggtttgtctgtggcctctctcacactatggcagtagagctaagtagttgccaaaaagaccatatggcccagaaagccaaacatatttatcattgggccctaatgtaggttgaaccctgccttagggtatctatatatttgacgaggggagctatccttttttaaaaaataatttttatttttaatttttgtgggcacatagtaggcatatatatttatcgggtacatgagatattttgatataaagggagctatcttttaatagctgtattgaagataataaataaaaaaggagtgatagaatatcaccagcttgcaactattaatacaaataggggaacaaattaataattataaatggttgctaatattattgaagagagacaaccagatactaaaggctttctgatagaattgcatgataccacctgcattagtccgttttcatgctgctgataaagacatacctgaaactggcaatttataaaagaaagaggtttaattgagcttacagttccacatcgctggggaagcctcacaatcatggtggaaggcaaggaggagcaaatcatgtcttacatggatggcagtaggcaaagagaagccttgtgcagggaaactcccccttataaaaccatcaaatctcatgagacttattcactatcatgagaacagcatgggaaagacctgcccccatgattcaatgacctaccaccagatccttcccacagcacatgggaattcaagaagagatttgggtggggacacagccaaaccatatcaccacttatgaaatattcttgcaaaaacaaaaacaaaaaaaaatcaaatctaaatcaggtcagacttttatatctaactaccaatctacaggaaatccaggggacagaagaatctcttgactagcaacacaggcaatcagcaaagtctcggatggtgggaaactatgggacaaacaaccgggtttcttccacaaatatattgtaaggaaaagagaatgcagtggtgggatggggaggagcttatggattaagacagaaagaaagcaacattgtgggcaattgcaatttatggctgtttcttattttctgattacaacacaaatactctgataaaacatttgtaagtggggaaattaaacacattctagatatttgataacatcacagaattattgttaaattttagatgtgatagttgtattatggctgtgtttaaaagagttcttgtcttttacagatgcatactggaatatttatgaacaataaaatatctggtatttgcttccaaataatttgacataattggaaggaagtgggtgggtatgtcaatgaagcagataagttgataatattgaagttggctaatagttacatgtagggttgtcatactattttctccacttttatatatgtattagttttctgtgggtgttgtaagaaataaccacaaacttggtgacttaaaacaaggttaaatttatcttacagttctgtagatcagaagtccaacatgagtctcatggtgctaaaatcatggtgtcagtaggtgtcttcgtctgttctgtgctgctgtaacaatacctgaggctgggtaatgtataatgaacagaaacttatttccaatagttttagagatggtaaagtccgagatcaaggggctggcatctggtgagggtcttcttgctgtgtcatcccatagcagaagttagaagagcaaggaagggtaagagagagcaagagatcaaactcaaagactcaagcccttttataatcaacattaatccattcatgagggtgaagccctcattacctaaatgcttaaggcctacgtcttaacactgttgcactggggattaagtttccaacacatgccttttggggacatagtctagcgatagcggtgggcagggctgcattcctttctggaagctctggggagaatgtttccctgccttttccagcttttagaggctgcatattcctaaacttgtgaccctttctttcaccttcaaagcctcaagggcaggttgagtccttcttatgctgccatctctttgggttctcaccagccatgaaatatcctctgctttaaaaacctcctgtggttacactgggctcactggttagtccaggataatctccccatctcaaggtcagatgattagcaaccttaatttccctttgccatgtaatctaacatattcacaaagtctaggaattagggtgtagatatctgtggcggatggaattattctgcctgctacattatatgttaggcattttccacaatagaatgtagaaaacaatatacaaaagttacctgaggaaaagcacacccttcatttttttctttagactgtgtttattaattgtctgcacaaccaattaagtttagagcaaaagttgaacatggtccatggtaataaggatattaactttgccctatttatgacaccaagaggaaaatgcagatgttgtaatctcatcactatgtagattgcatctaaagcattgaatagaaagaggaaccattataggatgatgctacagataaaatttagtttgcctaatttattatcttgttttcaaagcaaaactgtaacgtggtggtgaattatataaaaagaagctaattggtaggaaaaagtcaattaaaaatagcactttaccattataaaacatttgtactcattctcattcagcttcacaacaacccttctgttgggcaggatatgtgtacttttttccttttgtaggtgaagaagttaattgagactctggaagtaaggatttgttttaacttttctccgttaactggcaagatgaggagcgggacccagctcttttgattccactgcaccaaattgccttggtaaccaccagagaaacgctgggatgtgttccgaatactctgtttattaagaaaaagatgggtgtaactccatattaaattttccataaacactagatacaccaggtataaaatttaaggtatccgtttaatggtcactgacattgggaattctccccagcagcccttcctgctcagctctcacatcaacctatgaactctgactgtgaactcccagtgcagcttttttatttcccaattaatagaaatagcatcactaaatcccataagtttccttttccgtgtacaatagaagatggcgtttcccagcgatgcctgcaattaagctgaggccatgtgactggttctaaccaataggttgcaaggagagagtcaggcgtggcttctggattgaaacatggaagagcaagtgtgaattctccttacttttttttttccgcccttagtggtgatttctgaggtcacttgttgacatggtagagccccaggttggaagtggcttaggtcttagtgaaccactgaggtactatttaacgccagtatcagagatgttaacaccataattaagagttaaccaattatgaaacagcgtgtgtttccgctacaaaatctgagactctcgtagcgggcaggggtgtgtattcaagttaatatttctttgttctacagtctgacatcaatatatcttattttcttattaaggattcttattgccattaaagaaaaaaattgcttggcaaagatgaaaataaatagagactaagcaatatttgtagcttgtgagaattataaagacaggacaaaataataatataactggatgagaaagataagagtgcgtgttagagatttgcgctgtcatgggcagttatgcctctttaggcgagcaaattgtgcttgttgcagtgagattggtgagatgtaggcccgttctgactgtggatggcagcatggctttccaccccagccagacacaaagggcacaaggtggggcaggtgacctacagcccttggactgtgtcactctagggaacctctgctcagtcagccgttcagtttacaaaccttagattaagacctttgaaaacaagttgaatggtaaggaagttttctcccagcaacaatgcaataaactgaaattaaaatagataatctaacatcttatgtttgtgtactgttaatgatttacaaagcattttttctttttgtgcctcaggattactctgagaggtggtgggcagagcgattaaacccccatttcctgggagggtgcgtaggattcgccttcatgtcccttcctggctttacttagcactccacactcttttccttgtttgttcatttacacataacgctttggcaaattgttctccacgcagagtgtgttaagctcagttcgtaactcatgaactcctgtagattccccagctgcccttgcaattagtttgggaccaactcctactggccgttgacttaagatagaaggcaattaaaagccactgtgccctgtccaaccttttccccgctgagctgaccttggaggctgtgtattccagttgacagtgtagcccacggcctccatcggccttaggaatcagaaattagcctttcctgtgtgaagacactgacatttcagggtttattctgtggtttcatcataacacatcctatcctgattaataaaattacttactctccacaccttctaagtgtatcattaagagatgtttctaagaatccttagaaattggggctctgaaattggaatgcggaaacactccagaacacaatcagtatcatttccacttttaactttacatgaattttcccataggcagaattttatttatttttttatcaaaatcatacatttacatagtgtaaaatgttactagtgctatcaggcttatgagtactgacagcagcagctctctgccccagcccttctctcccaggtctgattcctttctgcggtttcccccggcatttatgtctatatttgtaaataatacacttatcctgctgtgtcatgttctattgtttcagatgttttctattgactttccactactgcagatgaggattcagccaccttttccccctcaccaccactgcgcctcccccatcttctcattatatcacaatttttggctaaatctgaatttactatttattatttataaccatgtaaatattgctgactgctaggacaagtagtgtgctttgattacatatatttttttttctgtgaaagttcctctttattttttatttgcttagcttgtgtatcagtaatgcttcccccttcattcaagcaccgtcagttctagtttccacatggctgaaggtcatggatcattttctgattggagcctgtgctcatggcacttgctcttcctcccacagttggatctggctgggttgctccccagctgccatcccagatctcatttcctggagtccatgtctaccttcttttggtttatactcttttgtgaatggagcacacccttttggagtttccagagaaaaggtgcatgacaggtgaaacttttgatatcttgctaatgtgaaaatgtttgctgatattgctgtgaatagcttgacagtttggatttggaaatggagtagaaaataatttccttcccagtccatctctggaagcacacactgggagtggttgcccttgaggaggaaaacagcttagggatggagcgagacttacttcactatataactttttgtactattcaacttttagaaaccatttgtagacactgctttacgaaacttaaatagacattagtaaacagaaatcatgagcaatatggagaatatactgcccccagtttaccatgtgctgcattgtatttaatatttagtcctatgagcaatgcatttattgccatgcaagaattttagcattgaaagggttttctatagaccagaaatggtgcaagcccaaacatgatcataattgcatgttataatggaaattcataaccttgttatctcagagcttttagaaaatttgtgaagatttggacattttagggaaaaggagcacatgtaaaccaaattttgggcatcaaagatggaagtagattggtctccaacagttgtcctgtatcctgaaattcttactgccattaccattatcattaccattaccattaccattaccattactcttcctaacaatgccaccccaaaccatttccacagaaaccaggttgctttaagtgggctttcttggactttcccatttgactaaatagcaactctgcagaaaggtaggcatctccatgggcaatgcaaaacaagaaagctgacatttggctaagggcttacctgcaacagttacatcatgttacacaaaattcagagttaaatgagcatatgagagggacatggttcaacctgtatcttctgtgaaatgctcttcttgctgttacataatattttacatgtttatggggtacctgtgatattgtgctgcatgcacagactgtgtaatgatcaagtcagggtatttggcatatctgtcaccttaagcatttatcatttctatgcgttggaaacatttcaaggcctctcttccagctactttgaaatatacagtacactgttgctaattatagccttcctactctcctgttgaacattagaacttattccttctatgtaactgtatgtttttatctgctaaccaacctctcttcatccccctcccacccatacaacctttcctagcctctggtgtctatcattccactgtctacctccatgagatcaactttcttatctcccacatatgattgagaacagctaatatttgtctttctgtgcctggcttatttcacttaacatgatgacttttggttccctccatgttactgcaaatgacagtttcattctcttttatggccacacagtatttcactgtatatatatatatatatatatatatatatatatatacacacacactatgtttttaatgtgatatgtttcttattataaaaagctctcaggcttgtccttaggcattagaacatttagaaacatctatctatctatcttatctatcatctatctaccttatctatctatctatctatctatctatctatctatctatctatcttccatctctatctgtcatctatctgcctatccatctatctatctatctatctatctatctatctatctatctatctatccatttaccttatctatctatctatctatctatctatctatctatcatctatccgtctacctaatatatcatctatctatgtatctatctatctaatctatcatctatatatctatctattatctatctatctatctatctatctatctatctatctatctatctatcatctatctatctgtctatcctactccctgccatggttggcccaagagcattttaaattatatagataatctttgctaatccttcctgcttttcccgataattgtaggggaaaatggccaaggaggggccttcagtggatacatacataaaataatttaaaatgttgacaaaaggtaaattcccatgatctagagacagagtggttcttaatctagagagtggttctcaactcaggctgaacactgtaatgacccaaggaccttgaaaaataccgatgcttgggtctttcctgagagattttgatttaattggtctggttacatcctgagcatcaggagttttaaaagctctccaggtgattctaatgcggccaggcctgagaagcactgctctagggaggatactgacctctagagatggaagtgaaagaggtcattgtttatctctgacggatcatagacactcttgtcttcgtatgtttatttattcagcaatacagattttccatcagttttttttccatttaatagactttattttttaaagcagttttagttcacagcaaaagtgagaaggtacagagatttcccatatacccctctccctatccatgtatagcctcccctactatcgatggtccccaatagagtggtggtgcatttgttacaatcagtgaacctacactgacacgtcgctatcacccagagtccatagtttacattagggttcactcttggtgctttgtaaattctgtgggtttggacaaatgtataatgatatgcatacaccttatcacatcatgcagaatagtttcactgccttaaaaatcttctgtgctctgcccatttatccttctctctcttctggcccctggtaacaactgatttttttaatagtctccatagtttgccttttccagaatgtcatatggttgaaatcatactgtatgcagcctcttcagattggcttttttcacttagaaatgtgcatttaagtttccttcccatatttttgtagcttgttatctcatttcttgtcttttcagtgctgaataatattttcttgttttgaggtatcacagtttatccattcacctattgcttctaagtcttgacaattacgaataaagctgctataaacatctatgtgcagctgttgtgcggatctaacttttcagttcctttggaaagacaccaaggagtgtgattgctggatcatacggtaaaagtgtgtttagttttgtgcaaaactgccaaactgtcttccaaagtagctgcaccattttgcattcccaccagcagtgagtaaaagttcccgttgctccactttcccaccagcatttggtgttgtcagtgttctggattttgacctttctaataagtgtgtagtattattaactatttatttattatttgttggattttttaaacttttattttattcaggggtacatgtgcaggtttgttatagaggtgaattgcttgttgtaaggagttgctgtaaagattattttggctgggcgtggtggctcacgcctgtaatcccagcatgttgggaggctgaggcgggtggatcacgaggtcaggggttcgagaccagcctgaccaacatggtgaaaccccatctctactaaaaatacaaaaaaaaaaaaaaatagctgggcgtggtggcgggcgcctgtaatcccagctactcaggaggctgtggcaggagaattgccagtgagccgagatcacgccactgcactccagcctgggcgacagagcgagactccatctcaataaaaaaaaaaaaaaaaaagattatttcaccgcctaggtaataagcatggtacctgataggtagttttttgattgttaccctcctcccaccctccaccctcaagtaaggcccattgtctgttgttccctcctttgtgtccgtgtgtactcagtgttcagctcacacttgtaagtgagaacatgtggtatttggttttctgttcctgtgttagtttgctgagaataatgacctccagctccatccacgtcactgcaaaggacatgatccccttcttcttaaggctgcaaagtattccatggtgtatattatatgtaccacattttatttattcagtctaccattcatgggcatttacactgatttgattccatgtctttgctattgtgaatagtgcttcaatgatcgtatgtgtgcatgtgtctttatggtagaatgatttacattcctttgggtagatagccagtaatggcattgctgggccaaatggtaattctgttttaagttctttcgggggtcaccacattgctttccacaatggctgagctaatttacattcccaccagcagtgtttaatcattgttggatttaattcctacttaaaaagaatacatgctaaatgctctccagacttaagtagtgttgtgtttttggtattatttgtctttcgtctacgttttcacattaaaaaatgaagtatacatgaagcttgaaacaaccgcacagtttaatgaatcactgtaaggcgaatgcaggaaaccataacctggtcaaccagcacttagaagctcctttcatgcctcgcctgaaaaataactcctgattcttttgataatccatttcttgcctttagagttctgcctatgcatgtattcctaaacaatccagttgtttccttgtatttaaaaattgtttagctttgtagctatagtttactcattactgtaggatgttccattgcgtgaatataacataattgaccctctctattgttgatggacatttttgttgtttgcatctattggctattacgaatgatgtgttttgaacagtctcagtgatgtcccctgtgcccaaatgcactaatttccttggagcatatgttcctagtgtggcattgctggatgatgcatattttcgactttaatacaaaatataaatggatttccagattgattatactaacttagccccacaaacagtatatgagaggtctcgttgctttaaatattccatagcactggtattcccagttccgtagtgtttaccagtatggtgcgtgggtaacagtgtttccttgaagttttaatttgagtttcctcaattaataaagagactcagaatatgcagcaaatgcttctgttgcactgtgttacatcgccttggctcaccatctgtttcttgggttttatttgctgttccttttcttactccttgaggtgtgttctcggcccattcatttcagcccttcttcctttctatctgtgtattcagggctgtgtgtttcttcctacacacagctttaactgcagcctacaagttttgacatgtagcatttccatacactttcagttaggtaatgtttattatctaactgatgataatttctcaggcacgtgcattagatcacatttgtttattcatgatattcatttttgctgtcttttggtctgcctgttctatcaattactgacagaaaaatgttaaaattgtcccataagtattgtggattttgcttcatatagtttgaagccaagttattggatatatagtaattaaaaagagttatatcaccttggtcatccgagcgttgcatcattgtgagtgacccattttaactcaagtaatgttttgtgccttccactcttgttgattttaatatatcagctttatctttcttgcttgttgcatgctgtctttttcccatccttcaatgttcaaccttagtatatccctatattttacatgtatcttttgtaaatagcttacagcgagatttttgtctaatccaacagtttttatgccttttagctggagtatttaatttatttacatttaatataattattgacatatttggattttccattattttgagctttgtatttgtattacctgttctgtttcctttttttctcccatcttgatttattttgggtttaattatttttttccctctaatagtttggaaattgtgaactctgattctattgctttagtggtcactctgaaaccacacagccatacttctttgataagaatctagaattaatcaatgcctttatcctcttcttggataatacaaagagtttaaacatgttaattataattattctcctcctgacacgagttaatattgtcatatattataactctctcattttaacaccattaattgttattattattcttttataggtaatgtttacttatctttgcccatctcagaccttccatctggaattgttttccttctgcggaaagtacctccttgaaaattaatatagaattgggagttagcagttgttttcttttaggacattgaagatttcattccaaccaccctttggcttccattgttgctgctgagaaaccagctactggtctaactatcatttctttgctttaagattttttttccttgtctggtattctgcattttcactatagatatggatttatttttatttactctttgtgggaatcattggacttcttgaattgctgatacttccaaggctgtcttttataatttgaacttagggagcgtgggcgtcttggaatctgtatctgaagtcttgcgagtctgttttgtcatttgttattcttctccacagtgccttgtgaccttgtgtggttgacttcctttgactgggcgctgatcattgctcttaaaattatttgtgggattccctgaggcctaggatgaaagtgcctgccttcagctctgaggtccactccctagacatgtaggtgcactaccttttggtacgcttcagcttcacagcttgaggtttcttggaatgctccagtgtggtggatctgggcttcaaatctgccaagcacctgcccacttttggacatattttctcctttcttgtttttttatattgcactaagcaccaaaggcagcattcttcacagctgtttgtgggtgagaggaaagaagcaggctcaccccagcccttattgtggagctgtgtatggttgcaatgaatgtgctaggagcctaaaagactcacaaactttggtgggtcctgagttttaatttctgtccctcccaactctgtgaatctatcaaaacacagcttaatcttgcaatctggactggctgaaggtaaaggggatcaagcatttcattgacttctctggggtcttgctttcctttaggtctaggcttggtcattcatcactatgttgtcaactcttcatgcgtataagaaaatgtaaaaaacatttagacagcattttaaattatttccagaagattattgatctcaacaatttagcccagtattgttcaagagtatgttctgtggggatggaaatgttctgtatttgagctttccaatatggtagccactgccttctgtggctattgagcaccaaaaatgtagatagcacacctgatgaattaaattttttattttacttgatttaaaatttacatagccacatgtgattgtggctaccatattggacagtgcagctctagtccataaacagttaccagaaacaagaatgcttttattctttagatttcctttggttgagcagataactgtctgcaatgcatctagcccagctcccagaatcttggtgaaacatagaggtatttttgggtttacttaaatttcctattcatatagtaaggctgtatactttatataaaacataaaatttttgttttattaaaaaattattaattagttaatttatttagagacatggtcttgctctgtcatccaggctggagtgcagtggcatggtcatagctcactgtacccttgaacttctgggatcaaatgatcctcccacctcagcctcccaaagcactgggggaaaaacgtcgttttaagtatcaccataatgagtaggtagaatgccgtttcttaagatgagtcacttaagcataggagagatacatactttatggatctttttggtcacaaactttaatacaataaactacagtttgcttgtcattccaaggccaacctcaacaacgtaagccctgtacttagtcttagagaaatatttatctagatgaataaaaaaagcaaagcaacaaaaacatgaatggagtaattttccacctggctggctgcttccacacctctcacccgctgcaggcagcagtaggtgtgtggaggagggcgacgacatgtcccgcagcaagagtgtctacccctaatagtctcacaaaactctgttgcttcttgctgggagatgaaaacagcttgaggacagggtttttgtctcatgtgtttgttccactctgcagaaccaagcttcgaactgtacttcatgcactacgatggcacagaaaagattttctgggtgaaaccattttggtgccattgtcttgtaattattaggaaatcaaaaacagcacagaattattatttcctccagtattctggaggatcctacactttgcatcacagcagctggctttgtcttggctacagcctcctcccttcttgtttctctggtaacaaatgctcacctctgttgacagggtgatccagggctggccaatcagagtgcctcactcccggctccctgaccctggaattgttcatggatggcagcaagcccagatcagagtccttctttgaggctgttcttaccagaatctcaggaggccctacatgcgtctctcggggagccacaagagtgggggccagctgctttaccctgtagtccttgccatttggagaaggcctctcagtaggagaagagaaggacaccaagcagggaggcgagaggtgtgggtgatggcagagggggtcccactggtgtctggtccccagttcccgtcgctgaggcccccggaactggccaggttctctagttcttccagctctttgaactctgctagtatcctttcaacaagttaattttctgttataaatgatccttaattgggtttctgccacttgcaacaaatatcttttatcctaaattgttaaaatgaaaagtgtgtgtgttgggggcacattttcaggggaaagaaaattcccaccagctttggaatcagctgaggtgggtaagtatattcttccccatgttcttccagcactattcttttgtccctctgtttcttcaatagtttttagtggacattatcctacaattcaaataccaaatgcatttctcatccaagatgagctgtgtcaccaatgaacaagaagagcaccagcattgtgattttttttttaaacagaactttcagggtacagaaaataacaccaccctgtccaaatttagggccacactgtcatcgagggataatcagtgtttttggttttttttttttttttttttttgagacggtgtctcgctctgttgcccaggctagagtgcagtggcacgatcttggctcactgcaacgcactctgcctcccaagttcaagcaattcccctgcctcagcctcctgagtagctgagactacaggcatgggccaccacaactggctaatgtttgtatttttagtagagacggggtttcgccatgttggccaggctggtctcgaactcctggcttcgtgatccacccacctctgcctcccaaagtgctgcaattacaggcatgagccaccacacctggcctagttgttgttttcatttgcccaagacatactgttctgttcctcccctcagtccctctgtctgcaagtgaaacattgtctttttaacctaaatacaagaaacatgattagaactcaatatattgacatgttcaccaaaagttcatggcagcacatttcatactagccccaaatgggaaacaatccaaatgatataatggatatattgtcatttgttcagtgggataccacacggcaaagaaaaggaatgaaccagcatcacatacaccaacgtgggtgaatcccacaaacgtggttcagagtggaaaccaaacagagagaataaaatgtgtttacataaagtccccaaacaggcaaaactaatcaatggtattggaagtcttgactatggtcattgtccctaacctgtgagaggaagtgagttggaggaacttgcagggacgaggtggggaggagggcttctgggctgctgaccacgttccatgatgtgatctgggcagttacccacgtgtgattgcttagtaagaatatatcagtttgtgtgcttacaacttgtgaacttttctgcatgtgacttatgaataaaaaagtctgaaataaaaccaatactctggagggaaaaataccataaggaatgaggagtgcctgggaaaagctccctgtgaactactcagacattcgctaaggagaaagcaaatgcaagttggatgggatagtggctaaacggaactcataggggagaaattattggcattgagaggatgagttctttctctggactcccttggagctttgatattggcctgtcattagaatttgggtggcaagcctgccttatgataaagactgaagttcttcaaaggatctccatataactcagccttttgctaaacttctaaaaaatgaacaattaatcagttcatcaactctcagagatcgtaaaagccaaaatgatttagataaagcaggaaaatcagagcagaggagacagttatggcatatgagaaacctgttcactactcaagttggccctgacatcaggccaggaatacagagcaaggttcgccattgttctgcccaccaaatgctcttttctagtcctaatgcaaactgatggtctctacttagacctgaggcacaaagaaaacatttcagggctgggcagtggctcatgcctgtaatctagaactttgggaggctgagatgggtggattgcttgagcccaggagttcgagaccagcaatgggtcacatggaaaaatcccatctctacaaaaaaatacaaaaattagccaggcgggttggcacgcatctgtagtctcagctgcttggagggctgaggtgggagggtcacttgagcccaggaggtcgaggctgcagtgagctgtgattgtgctactgtactccggcctgggtaacagagcaagacccagtctcaaacaaacaaacagaatatttcagaagggtcttctactccctatgcaaactgctaagccagcaagtcccacaggggtacagatggaaggggcctctgctaatccctgagggaaatgtcagctggggtttttattacaaagttagcatatactggggagcttagaaacaagagaaacgtgtttctcacagttctggaggatggaagtccgagatcaggatgctggcatggtcaggttctgatgagggatttcttccaggttgcagactatcaccttcttgctgtagcttctcatggtggaaggggcaaggcagctttctgggggtcccctttatatggcgctaatcccatgcatgagggtttgaccctcatatcctagttacctcccataggccccacctcctaataccatcaacttggggactaggttttagcatctgaattaccggggagagcacacaaacattcagacctcaacaggaggcgagcctcttggcccccctgctagcatccatctgcagctgggcaccctgtctggttctccaacgtcacttgtacaaaatagcgcactccttccctccagcagctgctcctcttcttcctcagaccccccgcctcaaatcagggaatcctcaagattcatggaattgaccactgggttgcattgtcagctcctatctccctgtcctccacccaattagtcaccagactcacccctcgcctcatctcaggaatagtggttctcatcctcagcccatgctcaagcccctggagagctttggagtcacagacaccagagactctgttctggggggtgtagcatgggccttcataccttagacgtcctccaggtgattctgatgtgcagcccaggctgagaacctccactctgcaatcagcctctttctctgcactgctgggctgatggtcctcatttcctccctcattctctctcctccacactacagtttcctaactgatctgcatatgtccagtctccctattcttgttcgcttgtcctgacctgttgatatcctaatttaaactctaaccctgatgttcaaaactttccaaaggtcagtttctgcccaccttctcaacctccccttgctctgcccaccccatgcacccacacctgtaggtacacaggtctgatcccctttcatcaacctgctgcaccttcctgttgaagctctcctctgtcgacacccagtcggatctccacacctctgggaaagcttcctggatcattcaattatgtaacaaatctcttccttctccacttccttacagcatgtgttaaaatttttttttttttagtatttaaaaaatagaggcagggtgtcactatgttgccttggctggtctcaaactcctggggtcaagtgatcctcctgcctcccaaagtgctgggattacaagcatgagccatcacacctggccaaacacagcacattgctaatgtccaggaaatacagtctgccctgcgttccgtatatttatggatttgggccccatccactgcatatgataaacgaccttgcctcctctgaatctagaatggcaatgaaattccactcatgggagaattgagaagtagctgctcaaataattctttattctgtagttcagatgaagaaccttttttttttttttttttaatggagtctccctccgttaccccggctggagtgcaccgccgccatctaggctcactgcaacctccgcctcctgggttcaaacaattctcctacttcagcctcccatgtagctgggattacaggtgcatgccaccacgcagggataatttttgtatttttagaagagatggaagtctttctttattgtggatgtcctgtgactttgaaataaatgaaatagtctattctgaacctgaattctagaggcaatgggatttgaatcagtgttggaacattctttccatacccttttccccttttgttactccactctaaagactaccaggtaaaaatattccatttcaccagctcctttgcagctaaagggctcttcacacaattctggctgatgagatataggcagaagtccctgggggaggattctcctgtgcttttcctcttctgtcttcctgaaatgtagatgtaatagctggaggagcagcagtcatcttttcgcctttagaatcacatgacgatgatgatgatgaagctgaagacagtaaacaccttatgagcagctttgttggctttggacttttacccttaaactcgatgttatgtgagaaaattaaccttgttacttgttgaagctatcctttgtcaagttttctgtttttgcaaaaaaaaaaagaaagaaaaaaaagaaaagaaaaaagccttatatctttatatctccatactctctcacacacttgggagagtgttcttaaactagtctgctttaagttcatgcattagaaacaaaggtgcactcttaacagcaataagataattaacaagtcttttatttcctgcagctcattttccttttacctcttataaatctcttgcactcattaaaagaacctgctgagaacttattatcagctgagctctggacatagcatagtgagctggccacacagcatcactggcagtggtatgctgataaatgcttgagggtaaggagacctggtttgagcatttgtcaatttctgtgatgtaaacactcccaccatggttgagcctccaacagagacctcgctgaagggagatttaggaagagatgttctcaattggttcttgggagtcctgggagccggctgcactaccctctgaagacagtgccccaagagagcagaccagggcccttgctaaaatcattttcttaagggtaagccttagagtatagcttatctattgtatgttgcctttggctcttaaccattctccttgggatcttgattacactattaatttgcttagcaaacacttccctcagagtataacaaaatatactgtgagataaaagtcttctgatggctacatgcatctccagggcaaatagctaggaaggtgagcaggtttggtcataggtcagtgacttttctttcctttgaattccccaaaagtcttggcaagagctccatagctttcccattttctttttttgtgtgtgtgtaatgcaggttatgagacataccatcctcactctaatttatattttggggggaatttaatagatccattttctttttcatagagttatgtttgatcatcaatccaggatcatcaatcctgggctgatctggtgtgttcagaattaagatgaattatttctaccattaatcagctattaataatataacatttccttttgctgaagtttgtataaagaattctcttaccagggagcatctgagccataagaagcctgccactcagtgttgccaaaggcagacttttagtgatgctaactagggtgcctcccctctgtgggtcttcaccttccccaatcccacccacctgcttgatatcttagaacttgcctatcctcatgggttgacctggtgagagcctgattatgctcacataaagtcacaacttcactaattaggccccaataactagagatttgttatacctcaatgtgtttagctcacgctttttgttatactctgagggaagtgtttgctaagcaaattaatagtgtaatcaagatcccagggagaatgcttaagagccaaaggcaacatacaatagaatataacatacaatagaatataattgatcatttagataaatagcataggatctttcctgagaaacatctttttaggcaaataatctcagatatttgatagacctagaaatcataaagaccttctttggtttgagttttgatataggttggatttgtgtccctgcccaaatatcatgtcaaattgtaatctccagtgtcggaggggagcctggtgggaggtgattggatcatgggagcagagttcccccttgctgttctcattgatagtgagtgtgttctcacaaaatctggctgtttaaaagtatgtagcacctccccatttgctctcttcctcctgccatgtaagatgtgcctgcttaccctttgacttctgccatggttgcaagtttcctgaggcctcctaagccatgcttcctgtacagcctgtggaactgtgagccaatcaaacctcttttctttataaattacccagtttcaagtatttctttatagtattgtgagaacagactaatacaaatgtgctcccccaaagtttatgtgttagaaacttaacccccaactgcaaagtgttgggagatggagcctaataagaggtgattaggtcctgagggatctgccctcatgagtggattaatgttgttatcatgagagtggttagttattgtgaaagtgggttgttataaaagcaagtttggcccccttccccctcttgctctcttgctctcaccctctcttgcccttctgtgtcccaccatgggatgacacagcacaaaggcccataccagatgatattgccatgtttttggacttcccagcctccagaaccataagccaaatacattattttccaggaattattatctttattcgacattttttgtttcaattttcttttttttcttttttattatactttaagttctgagatacatgtgcagaacatgcaggtttgttacataggtatacatgtgccatggtggtttgccgcacccatcaacccgtcatctccattaggtatttctcctaatgctatccctccccttgccctccatcacccgacaggccccagtgtgtgatgttccctccctgtgcccgtatgttctcattgttcaactcccacttatgagtgagaacatgtggtgtttggttttctgttcctgtgttagtttgctgagaatgatggtttccagcttcatccatgtccctgcaaaggacatgaactcattctttcttatagctgcatagtattccatggtgaatatgtgacacattttctttatccagtctatccttgcttggcatttggattggttctaagtctttgctattgtgagtagtgctgcaataaacatatgtgtgcatgtgtctttatagtagaatgatttataatcctttgggtatatacccagtaatgggattgctgggtcaaatggtatttctggttctagatccttgaggaatcgccacactgtcttccacaatggttgaactaatttacactcccaccaacagtgtaaaattgttcctatttctccacatcctctctagcatcttttgttcctgactttttaattattgccattctaactgggtgctgaacctaccacagcgcagcaaagccactgtagccagactgcctctctagattcctcgtctctgggcacggcatctctgaaagaaaggcagcagtccctacctggggaaggggcagctgtgggcgtagcttcagcagatttaaatgttcctgcctgctggctctgaagagagcagcagatctcccagcacagagctcgagttctgccaagggacagactgcctcctcaagtgggtctcagagccttgtgcctcctgacacctcccagcagtcgtcgacagacacatacaggacagctctggctggcatctggcgagtgcccctctgggacaaagcttccagaggaaggagcaggcagcaatctttgctgttctgcaacctcctctggtgatacccaggcaaacagggtctggggtggacctccagcaaactccagcagacctgcagaagaggggcctgactgttagacggaaacagaaagcaataggatcaacatcagcataaagggtgcccaggcaaaaaccccatcagaaggtcaccaacatcaaagaccaaaggtagataaacttctgttcatcaaaaattaccctgtctcaggtattctgttagagcagcagaaaatcaattctaacaaagctagacttcttttcggattattctataatccggattggtgtgacttcacccgaaattgtgtgaatgagaactatgagtatacttcaaaggatttttcagatgcagaattatattttataaagattttattagtttttaagtcttaaacaagatatataatcttttcagatgattccaacttaaatatgggtgacttgctaatcaattcacttctgttgtttagttttcttaaatttaaaaatagcatttatctgcccacataaagacttgaccatatgtgttcatagcagtttttatttacagttatccaaatcggaaacaatttaaatgtccatccacagaaaaataaagttttattatgttcacccaatgaaatgctgcttaccaatgcaaaatgaacaaactaatgatacaagcaacgtggataaatctcaaaaatattatgctaaccaaaagaagccagatataaaagtatccatgctatataatttcattaataagaatcctagaaaagtttaatcttaccctacagtggagtgggaagaggacagggtcccaagcagatgcccaggaagcaaaaaaaaaaaaaaaaaaaaggctctattaaactagacacattttgatgtgcagttccagaccttggtgcctaccctgatatcacatgaaatgctgaaatgctgtgcatgtgcatggaggtatgagcagtgatattctaaagcattatttttaatgataaaaacaggttttaaatgtccatcagtaggggaagactaaataccccagatattgtacatctgtgttgtggagccctctgcagtatttacaaagaattagatggaatgcccttgggagaaaaaaaatgtaagttgtaataaagctctatattttataaatttatctaaatgtggagggaatggtctgaagagaatcataccatgtgattattttaagtgaccctgtaaggaagggacaacgatttggggcaggagtcggggggtcaaatgtcttcttttgttaagacacagctattatgaatactgctgtgatgaaaatacaaatgcatgatgtctttttggtataacggtttattttcccattgggtacagatggacataaagatggcaacgtttgatactgaggactgtaaccacctgatgggatcttcctgcctgctgcataaagaaatgttagcagcagtgaatctgtatggttctgcagccacttcagttcttgactcctcagaagaaagaatttgactgaggggcataaggcagagggagagaccaaggcaagttttttagagcaggaatgaaagctcattaaacagttttagagcaggaatgaaaggaagtcaagtacacttggaagacaggcaaacaggtcacttgagaggtcaagtgcactgtttgacttttgacttggggttttataccttggcatgcttccagggtgttgtgtcccttctcccctagttcttcacttggggtgtgctgtccacatgagcagtggtctcccagcccttgggaggggctgtatttgcagtgtgtttactgaagtcgtacacatgttcacttgaggcatttttccctttgccagttgaatgttcgtagaggaaggtcatatagcaattaagctctgccatttttcctcttattgtgcatgcttgagcccacttgcccaactcctgagatcttactggggagctgctgatcaccagtttcaggtgtttctgttgggagactgcctttccctggtgccagttgtgactaattattatattattttagagagacagtttaacaaccacctaaccatcacctgatggtcacctgacattcttggttgtgggggccctctcctgccctgctcatgtgtgactaactacctaccataaaacatcccccccttaagagtccaagatcccaattctttgggggaaagatggttagtcttctataactgcttcctgctgacagaggactggtggtggttgttctgtaggtcttggcctcttgctagctgtcctcctgcatgctgaatcacttatgtgtgggggccacaggagtggggttggtgggtctaggtggtgtcatgggtgtcagacttgcaaaaaatctgaaaagatatctcaaaaggccaagctacaatagtgatgttatttgcaggagtaattgaggaagttgcatagtttctaacctctggaataatggctggtaatcgtttctgtctgtaccttagcaggtctcaggctcctttcctccccacagcctaatggcctgctattagctttacaaaagtgattgagttctgggcaaggcttcttatcatttaaatgatagcctaaatgtctttcaaagttagctcagcccagtagcccaggaataattaagggaaaggcaagatgggtggtgggttagctcagctcactgttataattgctctcctgatataatttttgcaaaggcagtttcaggactatttaggggggatggaggggagcaagggctcaaaagcaatcagctgctatgctcactacctgggtgataggatttgtgccccaaatgtcagcatcacacaatatacccatataacaaacctgcacatgtaccccctgcacctaaaataaaagttgaaattttttttttttgaaaaggacagtctttgtcataaacttcctggggctcaaatccaagctttgccttctactgtgtgacttcgtgcaagttatttcatttatttgggccttaaattcctcatctctaacataaggataaaataacattacctatgtgttataaaaccattgagcaaagtaaaaaaaaaaataatcagaaagtgcttctaggaggcttgcatagactaaaaactccacaaatgttagctattatattgtgagtggtgagcaaaaacgacttcagttttatgtaaagtgtctgaattttataccgtgagactgtattttcaatgtattataagtgtaattaataataataattttaaaaataaatagataaagtaacagaagtagaaatgcagatgactctgtcaagaagtttaaagaaaagaaggggaagaaaggcagctcagggaaaagaagtgaaacatctccatttaaacataatgtgcttcacacgtgttcacaagtctgcactgtgggtttaagttctaagctcaataccagctagttgagtaacatcaacccttaaaactcactgctttactgataatgcaaatgacctggagagacataaaataggagcagaagtttaccttaaaaatcacaaattgatgtccatgtcttaagagaaatttatcaacataactagaaagcagttgaagccaagaactaaagtgccctgtgaaaaaaataaagcatgatttgcacagttcccaggttcagaatacatgggcaagctagatggcaagaccagggaaaactctggtggacactaaattaattgctggctggccacgcttctatgacaccaagagatatatctaagcccctaccacacatccacctgcagtgccaacagaggatgctgggtggcaggtggggttcgtagctaatgctgaaatttgcatcactttaagacaccagtgtcatcatagcccagtgtcatcataagtgcacatttagaattgaggtgtattcactcctgcattctaacgtagaaaaggtccacttcccatctggtgtctgtggccagatggaggtgtagggtcttaggaaagcaatatgtcttgaaatattcataatgaaataatgtcaattgaaataaaccacatcaacaaaacctagtagctgaccctactctttggttttcagtctttaaaaattcagaagggaaatgcatctaagcaattccaatgcacccagtttccccatttactagttgagtaatgtaaaggaaacaacttgacttttctaagcttatctattaatacaaaacaatgcaatgagcgttgccaggccctaaatattgggagcacttgccttgggccagaagctcagcatggggtcatggcttacacatggtgagtcctggctactccacagggtggctgacttccttccttgtctcttccatctacacaacctgtgaggaggaagtcacttgaccaaatgaaaaatctaaaactaggaagcctaaaagtgtggttcaaatctcacagtttactatgtttatcacgtttactctggcagagctcatcagcttgaaaacctcgtttctttaccagggaatccactctggggaagcaacagtccaagatgttactggaaaggagtcccaatccagatcccaagagaaggttcttggatctcgtgcaagaaggaattcagggcgagtccatgcagtaaagtgaaaggggctgctggttgcccatgtttatggttatttcttgatgatatgccaaacaaggggtgcattattcatgcctccccattttagaccatataggataactttttgacgttgccatgacatttgtaaactgtcatggtgctgatgggagtgtagcagtgaggacgaccagaggtctcttccgttgccatcttggttttggtgggtttggccagcttctttactgcaacctcttttatcagcaaggttgttatgacctatatcttctgctgacctcctatgtcatcctgtgactaagaatggcttaacctccggggaatgcagcccagtaggtctcatccttattttacccagcttctattcaagatggaggtgctctgcttcaaactcctctgacaaaaccatcagaaaccagagagaaggcagacgcctcaaggtgacgctggccaagacccagacaggcatcatgtgtcccagtggagactggctcgtgatgacacctgagccacagacgatccctctcacacctagatgctatctaaggccgatggcaaccggatgccaccctgagcatgaggtaggaggcaattaacccctggttggctgaattgacccagagaacggagttgaccttcagttatcaatgttgaacattcttctaagaagacgtgaggagagcttgagatagaaattaaattcagacatactcagcatgtaaaaataagggatgttccatctgttgcccacccgaggataatggattgacacttcagggactttagcaatatgccaggcactgtgctaagtaactgacactgattagaccgtttaataattacaactgaatgggtggttaatgattgttatttcattgttttagatgagaagctcagaaaagtcaagtagcttcgttaagattgcacaactagtaaatgagggaatcgggagtgctgggatttttaaggtgcatttcccttctgaatggctgaaaactgcaaagtagagtcagttagacatccagctatcagctttatgcattgggtcctatggtagagagaatgtatctcaggtctgagcctgaactttcaccctcatgctccttcatagccccatgtctccagagtctgggcttcagacattgccctgggtcaggattcccaggaaacagactctgagatggagatgtgcatgcaggtggtgactgggaatggctctgaggaacagcccctgtgtgggagggagggagcaggatgccgcaggagaaattaaagtgcaatagggatgcaactgaggcctcagctgatctcacggagagctttgaagcttgggtggcatttcagagatgccttgaattaaagttttgggactgggtctttgtatcctagcatcactggatgcagtcactggatgcaggctacccctggcgtctgaggaatgcgcaccctgaactgagggcaggagttggccaacataccacagaaccactgcagtccacctgcagcattccgccacgttccagaagctcgcttgatgtgggcagagctcgtctgggacttggttggtctcttcctggataaacctacaatggaaaggttattgagacaaactgatgtctctgtgctgaagtgatcttgggacaatgacagatactcatgacctcccgcatctactacccagtcttgattctcctcacccccagctagcactgctagacttagactttgatggtccagggtgggggctgcccagactctcatccctcggggtctccttcctctgctcaccataccttccttggttcacgactgaggtgccctccatttgttatcaatattcagtcagcaaggactaataaacacctccgtggatcatgtgggtgctgaaggtgttcttccttccttccatgtgcaacggcaggctcttttttttttttttttgagacgggtctcactctgtcgccaggctggagtgcagtggtgcgatctctcggctcactggaacttccacctcccggattcaagcgattctcctgtctcagtctcccgagtagctgggactttaggtgcgccccaccatgcccagctgatttttgtatttttagtagaggcagagtttcaccatgttggccaagatggtctcgatctctcgaccttgtgatctgcccacctcagtctcccaaagtgctgagattacaggcgtgagccactgcaccccaccagaagcctcttttttaatgattagggccaattaatcctttcagatggtgacaccttttcttgctgctggttgtatggcaaaagaagcctgaagtgtcagggaggcagtcccagcttaatgtgtaatgagactctcgctgtgtcccttagtgggaaaagtccccctctggggagctgcaacgatgggaagcacagttctctaagtgagccactgggagcaatcataagtagggcagcactccttccagccactgaatcccatactcatggtagaccttctggggacacaataccatgcctttgttattgatttcaagagaatattgcatcttggagtgtagtgccccatccttgcaggagattatctccaagctgtatcctcaaagggtagcttctttgagctatcaggacagaagctccagggcagtgcgggatgtgataggactggtgaacccatgctcacttgcacgctgtcaaacttcttttgctgtgaagcgggtccctgggtccaaaggcaagtcgtgcaggattcacgtgggtggaccagacgttttgtaaaccctcggatagtgatggtgcctgaagttctgtggaaaggaaagccaaactcccaccaggatatgagttaattcctgtcaagcagaatcattcccttccagactggctggttggtctctgagtgattgtgccatactgggggctcagggttgttctctgtggcttgcaggttgggtatttagtagctagatcagccttggtgagttggagaccatgctgttgggtccatgcatagcctccttccctgtcaccacagctgcttcgttcatgggttcattgggccactactggagtgagcagtgagtgaggagggctgaacctcggctggctgagtcattctccctccttgttgtttgatgtctcttccacggtgaatgctgtcttggggaaactaacatagaacatgaccatctttatgtttaatgctcatcctgacaggaccattcacaggcctccttgtcccaaactttgaatttttcttcttgtaagtcactcaacaaccagccaagccattcaccactgccagtgaatctatatgtgttttaacctcgggccacttttgtttccgctccaagtagatgacattgggaagaagtccctcattacgtctttcaggggcaccctgaattatcaggggctgtagtgcaggaatagtccattttcagctagtaccatgtagcaagtttacccatctgccatctgtgaaccaagcatttccctccctgctcagcaggtaaaaagggacaagcccctttccctgccaccgtgtggtcacaggagttaactgaagggaaagcactggttagaagtggtggatgacaggcagggctgggtgtgggagagtgtctcggacacctgccactgcaacttacaagtgccttctggccctactggtgctccatcatgagaattatttgcagattgcttgtctgaccttatgagttagggggtcctgacctgaacccaggtcatggtgggctggctgcatggtccttgttgccatggttaggtagcaggacaaagcttttttcaaatagtgcatatttttctgctgctaatgatgtgagcttgctctagacctaagggtctgtgctgtgattctcctgttgagacttgtcttaactgccacctggtgtcttttcccactagggcctgccgggctgtatgggcccaacagcagggacacttgcacctcagcctggacctgctgccctgctcttccttctctgggtctcatgcaaaactggcatctttcatgtcgcaggataagtgtgtttcagcaatgttcccaagggtgggaaatgctgcctccagaatccagagaagtctgctgggccttgtgcttccttcttaaaggtgggaggtgtaaggtgcaataattttatgttttactttagagggaatgtcccagcaagccccagaccactggatccttacaaacatactgatctatggggttcctgatcttcatagggtttctctcttatctttcttcccacctcctggcaacatacttgttgcattttgttcattcagccttaatgtgtccacatagtggaccaacatgatgcactgtggaatgtccacaaggtcccggtcttttcagcctgtatcctgacagagagctggagaattaacatcgccctgggaagagctgtgaatgagtactgctatccatcccacgtgagcgcgagctgctcctactcctctctgctgataaagaggagaaaccgcattcatcggttgcttggctgtgtgccttgtctatggtcactggctctagaaaaagttctacatgggctcagcagctgtgcttgggactacacttaggtgagtttgcagtacttcactttcaccttctaagatgtctgtggcttggaagcagcctgattagtgaatgaaaaagggatatgatggaatccattggccttgcttcccttgcatctactgtttcccttgggatacaatattgtttttgatttactgtcttggcctgaaggcaaacataagtttttgcttggcttaccccactgtgatagctcttactctgcagaacaaggaatctatacatggtgtatttgtttactagggctgacataataagtatcacacactgggtggcttaaacataagaaatgtattgtctcagtcctggaggccagaagcctgagggctggctcctctgaggtcacaagaggagatctactccaggctctcccacagcttctgctggttgctgcagctgctggtgagctttggcttatagaagcatcactggggtctgtgccttcttcttcacgtggtatccttcttgtgtgtgtgtgtctgtgtgtaaatttctgttttataaggacaccaggcacatgggttagggctcaccctagtgaccttatcttaactcattacatctgcaatgacccttttttcaaataagttcacattctgaggtactgaacatcaggactccgatatataattttgtttgggggaagactcaattcagcccataacttgtgggttctaccaactgtcaagtgtgcccaccccaattacacatggtggatggggaagcacccactgggtgagtctacgggcctgatgggcctgggccaggactcttccttccttccttccttccttttttctccctttcctttccttttctttctttcgttctttctttcttttctttctttctcatctcccttcccttctcttcctttctttcttttcttttctttcttttgatatgaagtctcactctgtcacccaggctggaatgcagtggcgtcatctcagctaactgcaaactccacctccctggctcaggtgatcctcctgcctcagccttgcaagtagctgggactacaggtgcatgccaccatgcccagctaattttttgtatttttagtagagatggggtttcaccatgttgctcaggctggtcttggactcctgggctcaagtaatcctcctgcctcaagctcccaaagtgatgggattgtgggtatgagccaccatgaccagcccagttaataatttcttatgctataaaggcctctttctaaatgtaaatacatgcttttgttttcatctgagccatagcattccaacttagttttagtccaagttatggaggtccacgtatttattttcttaataatcatctctagcactccttcattccttcatccatttattttccattgagtgcttatccatgacaggtagtgtcctagattctgaggatacgttgtaaacaaataagaaaatagatccttgctcttgtatagtacacagagtgttatggctaattttagcttggattatggaagtataaatacaatttcattttatgcaagaagaaaatatggctggaagatgatcattcacgggctttataattagcataatttacagtcttcttccaactttagggtgagaattcaccggattactgagttacccaacctcactgaatcaaatgaaatgtgggtgtgtgtgggggggtggctggggagggaaccaacccggggatgttattaaagtaaaattttataggaagtctttctcattcagtatatcaccctgcagtgccacctggcggttacaatgaaggaaaccatttcaatccacactgataattgtaggaacctggaaactgtgggggctcccatgcactcatttcccaagagggtgtcaggagggtcgtgcactagagcccgcagtgagtacctgtctcagtgcttagttgcaccactgcggaggaggcatcatccagcctgaaagtgccctccctcatgactcgtccctcccctaatacaaacaccgcacaggtggggtccaaccataagtccccaccccttaccacagcttagactcatttgtttgtgtgatttattttattttcattttgttactagccactctaaaaacgagaatttttttttctttttttaaaaaaatttattttaggtttgggggtacatgtgaaggttttttacgtagataaacacgtgtcatgggggcttgttgtacctatttttacatcacccagatattaagcccagtacccaatagttatcttttctgctcctctctctcctcccaccctctccgctcaagcagaccccactgtctgctgtttccttctttgtgttcgtaagttcttatcatttagctcccgcttgtaagtgagaaaatgcagtatttggttttctgttcctgcattagtttgctaaggatgatagcctccagctccatctgtgttccagcgaaacacatgatcttgttcttctttatggttgcataatattctatggtgtatatgtaccacattttctttatccagtctgtcactgatgggcatttaggttgattctatgtctttgctatggtgaacagtgctgcaatgaacatttatgtgcatgcgtctttatggcagaattatttatattcctctgggtatttacccattaatgggattgcttggtcaaatgctagttctgcttttagctttttgaggaatcaccacactgcttttcacaatggttgaactaatttacactcccactaacagtgtataagaattcccttttctctgcaacctagccattatctgttatttttttgactttttagtaatagccattctgacttgtgtgagatggtatctcactgtggttttgatttgtatttctctcatgatcagtgatattgagctttttttcatatgcttcttggacgcatgtatgtcttctgttgagaagtgtctgtttatgtcttatgcccactttttaataggattgtttttctcttgtaaatttaagttccttacagatgctggatattagacctttgtcagatgcatagtttgcaaatagtttttcccattttgcaggctgtatgtttactctgttgatagtttcttttgctgtgcagaaggtcttaagtttaattagataccatttgtcaatttttgcatttgttgtgattgcttttggtgtctttgtcatgaaatctgcctgttcctaggtccaagatggtattgcctaggttgtcttccaaggttcttatagttttgggttttacatttaagtcttcaatccatcttgagctgatttgtgtatatggtgtaaggaaggggtccagcttcaatcttctgcatatggctagccagttgtcccagcaccacttattgagtagggagtcttttccgcattgcttgcttttgtcaactttgtcaaagatcagatggtcgtagatgtgcagccttatttctgggctctctattctgttccattggtctatatgcctgtttttgtaccagtaccatgctattttggacactgtagccttgtagtatagtttgaaatcaggtaacataattcctccagatttgttctttttgcttagattgccttgactatttgggctcttttttggttccatataagttttaaaatatttttttctagttctgtgaagaatgtcattggtacttttataggaataacattgaatctgtaaattgctttgggtggtatagccattttaatgatattgattcatctaatccatgagcatgcagtgtttttccatttgtttgtgtctgttctgatttctttgagcagtaattcttttataattctcattgtagagatctttcacatccctggttagctgtattcctgggtattttttttttgtgtgtgtcacaattgagagtgggattgcctttctgatttggctctcagtttggttgttcctggtgtataggaatgctagtgatttttgtacattgattttatatcttgcaactttgctgaagttgtttatcagctgaagaagctttggggctgaaactatagggttttctatgtataaaaccatgtcatctacaaaaagagataagtttgacttcctctcttcctatttggataccctttctttctttctcttgactgattgctctggttaggacttccaatactatgctgaatggaagtggtgagagagggtattcttgtcttgtgctgattttcaaggggaatgcttccagcttttgcccattcggtataatgttggctgtgggtttgtcatagatggttcttattattttgaggtatattccttcaatacctcgtttattgagagtttttaacacaaatggatgttgaattttatcaaaagccttttctgcatttgttgagataatcatatggtttttgtctttagttctatttatgtgatgaatcacatttattgattttcatatgttgaaccaggcttgcatcctggggatgaagcctacttgtttgtggtggattaactttttgatgtgctgctggattcggtttgcaagtactttgttgaagatttttgcatggatgtttatcaagggtattggcctgaagttttctttttttgttgtgtctgtgccagattttggtatcaatatgatgctggcctcatagaatgagttggggagaaatcttcttcctcaattttttggaatagtttctgtaggagtggtaccagctcttctttgtacatctggtagaattgggctctgaattcatcacatcctgggctttttttgattagcaggctatttattactgattcagttttgcagctccttattggtctgttcccggaatccatttcttcctggcccaatcttgggagggtgtatgtgtccaggaatttatccatctcttctaggttttctagtttgtgtgcatagaggtcaaatgaaaatttctgtatttctttctttccttctttttgtgttgaaagaagctcttgctatgttgcccaggctggtcttgcactcctgggctcaagcaatcctcctgcctcagcctcccgtgtagctggggctacaggtgtgtgctttttattgcacttttcttccacctgactgtaagctccatgagggcagaagccatgtctgtttcacatcctcaaggcaccaaaaccagtatctgatacatgatatgtgctctctgtgtgttgaaagagtgaatgggtgtagggggtgcctgtgttgtaaatcatgttctggaggtgacctcatttccttggaggcttcctctggatcaggtcaggcatatgatgaatccctaggctctctttgccagcgtggtggcaggttctcttccaggtcttgttcaggctgataattgatcagcagtaattgatatgaggagagacagaagaaacagacaggaactagaatccatagattcctgtgcatgcaatatacaccaatacgacttaacactgctgcacatcacaccactctcactaagggtcactggtccctaaaatattttcctacaggtattacatgtagaccacataaaacaatctatttggcttggtgttcatgtgttcttcccgccatgccatagggcctgctctgtgctccagccactgaggttagtgaggctgatagggagtcatttccactggcaacaccctgggccaagcgttattctcatagtcacgaagcaatccttggcaattcgacatgtggaaacatcttcatgatttagcttttgattaaactttttttgtcttagactttttaaaaataacctttttcctttagaatagttttatacatacagaaacattgtgaatatagtatagatcagcagtccccaacctttttgacaccaggaatcattttcatggaagacaatttttccacagacctgaggtgagggagacggtttcaggataaaactgttccacctcagatcatcaggcactagattcttataagaagcacacaacctagatgcctctcacgcacagttcacaatagggttcacacttctatgagagtctgatgccaccactgatctgacaggaggctgagctcaggcagtaatgtgagcaatgtggagtggctataaatacagatgaagctttgcttattcaccagccactcacctcctgctgtgaagagcagttcctaacgggccacagaccaggaccagtttatggcccaggggttggggacccctggaatagaaggttcccatatactccatacccaatttcccccataattaacatcttacataagtatggtacgtgaaaaacatcagacaaatctcaattgagaaacattcaacaggaaacttgaccagtactgctcataactgtcctagtggccagaaacaaaaaggccagagaagttacagccaagtagagcataagaagacatgatgactagtctaatgtggtgtcctggatggaattcaagagaggaaaagggcattagggaaaaactgagcgaataaatctgaataaagtatggactttggttaatattcatgtgtcaatattggttctcatcaattgtgacatgtttaccatactaaggtaagatgttaataacaggggaactgtgagtgggggtacatgggaattctctgtatgatcatattactttttttgtgaatctaaaactactctaaaataattttatttaacaacaacaaaaaatcagatacttcaaaacaaaacaaacaaaaccaaccacagccacccaaagagaacacagccttatgtcacgtggctggtggattgaactgcaggtggaagtaacttaacctgtagaacgagacattttaaaccatatctttcattgaaagaaaagttttccaaatgggagattaaattagtgaagcatcttataaactttatcataaatatttgaattaaaagatgacacagtagagtgagaagaatacagggagactctgaagtcaatgttaaagacaaaactcgtggcctcccaatagcaatagcatgactcttggcaatatcgtgagatctttatagcttccgtttagtcccggtaaagtgagtataataatacccacctcttatcattgtaaggctgattgaatgagactgtaggtacagccccctacaaagtacctggcacaggaaagcaatcgttccacccaggcaattctgaaatctgtaaaacagaaaaccaagaaggggtgctggaactcggcaccagtgcaagttcaggcggaagtcctgctttttctgggaagcctcctttctgctcttaaagctgttcaactgattggatcaagcccactcagactatctggataatctcttttacttcaaatcaaattaatgttaatcacatctacagaatgccttcccagaaacacccttattagtgtttgattgaataattggggactagagcctggccatgatgacaccaaacctggccatctgtcccttccttccttccttccttccttccttccttccttccttccttccttccttccacccacccatccattcatttttccatttatcctttcttctttccatccatccttccattccacccatccacccatccatccatctacctgcctatttatcatgaacactgttctcctgtactataactgaatgaaaggtcatacccattaaaaaaattctgagttatatgggtcaaggtgagcacacttactttgtaaattgccaggtagtaaatattttcagctttgtggtccctttgtctccgtcacaactcctcagtacagttgttgagtacaaaagcagccacagacaatatgtgagtgagtaggcatgactctgtctgatggaactttacacaaaatggatgccaggtgggactttgcccatgggctgtggctagctgacttctgatatagatcagttgtaaagatatgtttttagaaagcactgactgagtggaaagggaagctagtgaaagaagcttgcctatggtaggtctacaaaaaagagacaaagggaagagcactttattagggctcagagcaaggcaggagtgtgagaccatgacaagtgctgtactcaatgcaccctcagtcatgctgtcaccaatcgtcgggttttcctccttccaggcacatgaccttctctgccccgttgaagtaagctgttgccatgtgatttgatttggacactgaaatatgagcagaaatattatgggggaaactttaagagcagcccatgtttgtcacatttctgtccctacagcagcagttttaggatgaagcttctaccaacctgagtgtctgagtaagatgagcagaattccctcacccaccaatgctatgtgagtaaaaaataaactttggttgtattaagcccccagtattttgggattgttaccaaacagaagctggcctatcctgtctgatatacctaacgacaccaacaatatttaactaaaatttcatcccttgtatcttttgtatgctaccttatctgtatgctacctctgtcttttgtatgctaccttatttgtcttcataacactttctaccaccttacatatatttatctattcatttacttgtctgttttctctgctagaatacaagcttccccaaagcagggacttctgataattgctcttaaagcttggaatgatttactatgtgacataatcaacatcaccaaaagcatcaacaacacaaataagcatatgtgtagtcctcacaaagctatgtgaggtagatagtattattaaccttgtttttccttataggtgaattattctcattttacctataaaaatgcattagttatctattgctatgtaacaaattgccgcaaaagcagcttaaaacatcacacgtttattaggtgtgagtcaggtgtctgggcacaacttgttggtcctttgttcagggtttcttgcgagacttcaatcaaggcactggtgagggctagggcctcatctgaaggctccactggggaaggataggactttgaagctcacatggctattggcaagcctttatttcttgcaggctgttggactgagggctgaagtttctagctggctgttcaggagagtctgccctcagtcttgattgcttgccatgtgggtgtctccaacatgactatgtgcaccatccaagtgcacctgctgagaagggaatagagagattctgctagcaagatggaagctgcaatcccatggaatcacagaagtgacttttgctgcaatctgtgagttagagaagcaagtcagaagtcccagccccactcaaagggaggaaattacacagagtatgattactggaggcagggattactgagaccatctgagagtttgccttcaagaaggaacttggaattcagagaggtcacagagtgggtcagtggtacagatcgtgtcaccctgacctcactgagacctgacagaactataaaggttatgggtcaaaaggtagaatgtattccctaaagcaaggcacaagtattaattttgttccaattagggccagaatcaggatcttgagtacaaagttcacacatcttctttgtaaaaaaatatgaaatcagaaatgaatctttaagaaattagctgttgattacatgaaattattaaacaaattgcttggatctaaaaaacctttgggcctggcatggtggctcatgcctgtaatcccaggactttgagaggctgaggcaggtggatcatttgaggtcaggagttcaagacaagcctggctaacatggtgaagccacatctcacttgagcctgggaggcaaaggttgtggtgagacaagattgcgccactgcactccagtctgggcaacagagtaagaccctgtctcaaaaaataaaataaaataaaataaaataaaataaaataaaataaaataaaataaaataaaataaaatgccttttgtttcttcaagtaatacaataaaattcttatctctgtattaataatagaattaagtggaaatattttcacttattcctctttatatgagtacttttatttggtgcaacaatgtacccagctaaaagaatacatttctcattttcctttgcaggaggtgtagacatttgactaaattctagctactgtgttatgtgggcttcttggaagattccttatagctcggtgatatggtttggctgtgtccccacccaaatctcatcttgaattcctacgtgttgtgggagggaccctgtgggaggtaattgaatcatgggggaggtctttcctgtgctgttcttgtgatagtgaataagtctcatgagatctgatggtttttaaatgaggagttcccctgcacaagctctctgtttttgcctgctgccatccatgtaagatgtgacttgctcttccttgccttccgccatgactgtgaggcttccccagccacatgaaagtgtaagtccaacaaatctctttcttttgtaaattgcccagtcttgtgtatgtcttttatcagcagcatgaacatggactaatacactgggtgatcagttggtcatcacattctttgtagatttccttcttcttgctgcagccaccagctgggcagggagaggatattgagaacaaatttcatgctgaggatggcagaggagaaagatgaaaggagtctaggcctgtacatctcaacttctttgtgcaggagagtaacgccttacatgcattaatctgttatttgaggtttcctttatatgcgtttggattgtctgtggctgcaacgaatcctgatacaatacaaagtatttacaccctagagagctgtgctaaagaacctatttgccatctcatcgtgctggcaaatgacacacaacgttcagtaaaactcaagcggatgctattctgttctctgctaaatgtgcctgatttatccattgtgatgtcctgccattccagatagagatcaggattcccttgccccatggctctgctacagagtctgccttgcccatctggcatgtaaaaccctgaaatgtaaaactctgctgtttgtaggagtgccaagatgtttaaacatattttagatattttttggaaagttgtaaaacgtggctaatgtaggaaatggtagcagttcataaacactacttattgttcatcacttcagatgtcactaggcttatgtaaatgaaaccgagatatttttcttttttctgtgtgaagtcaagcccattttttcttctaacattatagacatcccagagtggttatcagcatttgaaagcagcagggcctctttcttcttcttggatttggttaaaacaaaagggctacggacagtcttgaaatgtgaaccaaaaccccatgtttttaaacacctcagcaaatccgaatgaagacaagtttcctccttcagggacaaagcagggttcagtctataaaacctgactttgaagcagatgacaacttttcccacaggtggtgcacaagtacttctaggaaacacaaacacctaattttgatcttatttattaggattttattttaatgtggatctggaaaaaaaactagcacatcatgctcataattatacggatcttactgcttaggaggaggcctaattaattgtgtgcaattaacagccgttaattgtgttttagagatcaagttaaagaataatccttggtaaatcttggctgcgggtgactgatggaagtttcagaggctggactggaagatgaaactggggcaagatgttacacagcatggcctcaggaacctgagctccagcaacctgcgggtcccaatggaggcgaagtcaaggagcgtctcagagagtggttgatgtgtgaagtctctgtctgcccatctgaataacaagagatggggcttgtgattttcctccacggtatgttgtctggttcctaatcccctctcattactgtcagttttaactgtgtgtgggtctatgtgtgttcacctctcatgggcagggtggcagaactcgctagggtaggaggagagaccacgaagtcagaccttgattcctgtgtggactttgaaagagttttctccatgatttagcctgtggatttcagcattttgaaaaattaaccagaaattcagaaattagatggagacctctagtggaggcctgggagaagaaagattggaagattggagtctacaaaggctgggatagtggcatgtggatgggctgcttggagtgcgcagaagacacgcaggcctctgtctcatgtcggggtccaccagggcctctgggtgccgcatccggtggtgttagctggcctctctcctcagtcaccagtgctcaggcagtggctgtggatggaggagccaagatggcagggcagggtggaggcggtgcatgcccctcaccaaggctgatgtagctgctgcctccactgtgtctgtcctacgcttctagccctgggggaccagcaaacacttgatagcaggttgattacatctggccccttcaattgcagctggaggtgattttcccttactggaattgacacctgctgctaatacagatttgccttttctgcctgttctcctgccagcacccctacctgagggcctccaggaggaatgacatctcaaacagaaacctgcataacatcagcccaaaccaaggacccattttatcatcaaagaggtgtgccatgaatgcatgactgtgggatccactgctttgaccacatatggatgacttggaagctgccagcctacatgaacaatggaaaggccattgatggctcagcaaagttgccagctgagggccaatgctccccagggttggcctcgagggtggccacagtgctgtaacaacagccagtgtggtgctgaacctgcagcctacctatgatgctttgacaccaattgtcaggacacacgggtctggaaaccaaatcttggaagtaggattggttgctttccgtgtaactcctagtgacccactagtagaattttgcttcctatccctgagaacttatattccacaggactagagatcctggttcctgggatgaagcagggcagcttctgctgaggttcacagtaaaggttctgttgaacccaaatatgactatcactgggtccctttgggcccactagtggacgagcaggcaaagaaagaagttactccaccatcaggggacagataattccagctctcaatggggctatggttgctaccaggggactgaaacacagctgagactgaggagattgtcggtggcttcttctggtgcttccaagtctggggataatgatgactgggcagccatcagagcctgataaacacaaggcaaccaagagctcagaccctgagcggtgaaaaggccagccagtgctcaggcaggtcacccagaccatcataagcgctgatagaaatctaggacgtgcggtggaggagggagatgacacgtcccaaccatggtccctggttagctgcaggtggcgtgtccaccacgccttctctttggagtcatttggagatggtggctggccacgatcttgcaggcttagtgacagaacaatctgagaagaacgagggggggagctgctgcagacccatgtggtgctctgcctcatgccctctcagcctaacctctaatttcagcagagatggggtgtgtttctgttccgtggttaagtcgctgcatgctcacagaggcttacttcaagcacgggctgcaaggttttactttcttcatcaggattcctctcatgccacgaatggggaaagttcacagttgttggagctgatattcctagagaaaaatgctggtaagtaaaggctcatacctcctgtttttcttggggggactgttctagagccttctgtgcccttctcagtatgtctaagcagaatggagcgcccattgttcacagcagtttccttggcaatattgttgctttttcctccccagtctcactgttacaggttgaattgtgtccccaaaaagatatgttcacgtcccaacccttggtatctgggaatatgaccttatttgcaaatagggtctctgcagatgtaatcaacttaagctgaggttaggctggattagggtgggcccttaatccagtatgactggtgtccttataaaaagacaatgtgaagatatgttgggaaaagactgtgtgatggtcagacagagacagggattggagtgatgcagcttcaagccaaggagcgccaaggttgacaacaaatacctgagccaggaagaggccaggaaggattccctcctacatttttcagagggagcctggccttcccacatcttgatcttggactcccaacctccagaaatgtgagagaacaagtttctgttgtttgagctgcccagtggtggtcatggcagcctcaggagatgacgcactcgctctttctgcttcctctctcgtgctcccggggtgacctctccaataaactgcctggtcacaatccatttttccagagttttctttattagaaacccaagctaggataacctctacgctgtgcaaagagggagacactgctgtctaaatgagactttagtttttgaatgaactctttttttggtgatacagttaatcataattccatttaccattttctgaccgcctattatgtgcctggcactttacaaacatatcaagtctaatctagtatcatcccatgtggtagctgctattatcctattttatagaagggaaactgagtctgatggaggttgggagacttgcactatttgtgaccccaaatctacattctttctaaatacctaggacccaatctttgcccaataatttactttctctgtaggttccaacttttctttatgtatccacctggattagttgatatctaggtttggctgctgtgacaaagaccaaaatatgagtgacttaaacaagatggacgtgtatttctctttacagaaagctacatatggggcagtcctgctcctcagggcccacagaagctcagattcctcctgtctacttgctctgccaagtgttgtttttggtggcttaacgccacttccactctccagccagtagaaaggtgagaaaagcgaaagagaagaacagaattctcttcactgcaggatctccttacatcccactgatcagaatttccaccatgaccatgcctagattcaaggggtgaggtgaggggaggagctgggaaatgcagtctgcattctgtgcccagctaaaatgtagggatgcggttgccatagaatcggggaaagtggatatgggggcatggcagctggtgctcacggggcactctttgcctttgacagtggatcaggcattatgcagagcacgaagaggagcacattgtagtctctgacttcagaagaagcagacagcaaaggtggtttccttcctggtggagattgccgattggactacagaatggcgagaatactgtgaaaggaggagcatagaaatccaagtgtgatcagtcagcaggtcttggccaggagcatacacagaataaacaaataaataagtaaagagaggaaggggaagtaatgttaagactgttcaagacttggaatacagctctcctaaaaagcagtcctttgaagtcttgggatactacagaaagatcccaacaaccactgagcctggtttcgatttttggaggaaacacaccaggtgaataaagcagtgtgacgtgagagaaaagagggcggcaaaggtgaatgggatcccagcctttcaaggacttgggcagagcaactggaggaggtgtgagtccagccaacagtgtggatcagtttcctaggctgccataacaaagcaccataacctggtggcttagaacaatggaaaggcatttgctcacggttccagaagctgtaggttagaaactaagtgtggcagggtcatggcccctctgaaacctaggagggaaggatgcttccctgcttcttcctgcttctgctatcccctgatgttcctgggttagtggcagcataattctggcctctgcctctgtcttaacgtggtgttttttcctgtgtctcttcatattgccttttgtctctgtgcctctacctctgagtccaaattgcccctttttataaggacaatcacattgtccttagtcacattggattggattagggcccactatacagaccttgttttaacttgattcttctatcaagaccctgagaatctccaaataaggccacattctgaggaactgtgggtttggacttcaacatgtcttttttgggggccacaactcaacccataccagcttgcttgatggatattcatagctgatgtcaaagtaaatttaattctcatcctcagaagcaagaaagattccacgactaaggccaacaataacatccagggagttcgtttcttgagcaacgaccagctctttgcatagcacgaattgccaaaaaaggccagcgtagtcatttctcggccatgcacacctgtgatgtggcaagccatgttgacgtgccaaaaatgagaattctccagtaaaaataaaatagagtaaattagataataatgttccgaaggcaatttatacttttctgtgctttgggattcattttcaaaacatgtttcatttgtctttgaaaatcgaagttcacgttcaaggcccctttgagtttgctttttgtccaactattcgggcatgcaatagtcactaatgggaactcctggcttagagccaagaaaccaacaaaaggccccaaaatgaatgctttaaaagactgtgcatgttttaaaggcctctcgcctatcagcaagcaccactgtttctccatggacaaaccagagtgtcctgacaaggtctcctgtcccctggcagacagctgacacccgaggcccatcaggctgggagcttgcttgtctggaatgtctttgaatgcatgggctatcctttcccactcccccatagcctcccctatcagccaaagtaatttgaagatgtggtggtgttataagataatctaggataatctcccaattcttgcacacttctctgttgagaggtcggtttatcgcttcttgcacacttctctgttgagaggtcggtttatcgcagtttgtttttaggtctattaagaggtctaagtcccctctccctgaatctgaaccctgtgagtgcgtggctgatagagcaccttgggtgtggctgtggtataagtcctgaggatgcatgtccttccatattcccttctctttgagtgtgggagagtctgggaatgctgcgctattactcttgtgatttagagcaaaagggatatgatttgagtgggcctagtctaatcacatggactttttaaaagcagagtttttcctccggctagcagcaaacaaggaagtctgagatttgaagcaggaggagaatagggtgcattgttgctgcctttgaaaatggaggggccacatgccaaccagtgcaagtagcttttagaagctgagaagagcccctaagtgaattcagctcacaaactgaatgagcttggaagtggaatcgttctcagagcttccagaaaaggactcatctgtctaacaccttgatgttggccttatgagaccctacctaagaagagaacccagtcaaaccttcccaggcttttatggaactgagagataataaataggtatagttttaaggcatgaaatttgtaatagtttgttatttgccaatggaaaactaatagagtgacactgtgcccaattctaggttcgggctgcaaaagacttgtagcttttatttgtttcttggggcatttgctcccggaatccagcagccatgctgtgaggaagcccaagcagccccacagagaggtccatgtcaaagagagtaagaccctcagcccagccagaaccaagctcctagtcaatggccaggactgactttccagctttgtgaatgagccaccctgaaagtgaatcctatagccccagctgatctgttccagctgacccatgtgaagcaggacaggacattaccactgagccctgcccagattgcaaaataaatggttgttcttatttgaaatcactaatttttggggtggtttaaatagagggcaaattttctgctgctcatcctcataccaaaattgctaattatgtctctagtaatatggttgatgtccaggataacttaaatgagaccattaagtgacaatgtgacattcctatccaaggggaaaaacagctcttgcaaccgtaagtacacattgttctaacctgctttcttcataggattttgtgaatcaaggactgcaatggacagagaatgttttgcaaattcttagatatagggggatttatcaactttgtacccaaatataccacccttatgaaaatgacaataagcattgctgttgaaggtgtgatgaaataagctatctctgacacaaaacgtgggattgtaaattggcatagttctggaaactaatttaactctatcaataattttaaagtgagaaatgttttgacatataattctaattaaaagagttaaagaatatagttaagatataattccaagccgggagtggtggctcatacctgtaatcccagcattttgggaggctgaagcaggtggattgcttgagctcaggagtctaagaccagcctgggtgacatggtgaaaccctgtctctactaaaaatacaaaaattagctgggtgtggtggcacgtgcctgtagtcgcagctacttgggagggtgaggtgggaggatcacttgagcctgggaggtcaaggctgcagtgaaccatgatcacaccactgcactctagcctaggtgacagagtgagaccctgtctcaaaataataataataaaattaaaaaaattaaaaagttaaaatgcagtatttgaaaaaagaaaaaaagatatagtaccaaagacaaaataaaagaaaacaataaccctctatgcatacataaattcatctcagtattatttgcaatattgaaaaatggcaaacgacataatgcttaaccacatgggtattcttatgatgtatttaaaatgattttatgttttgtatcataaatgtagcatattattatgaagccattaaagcaatgttcatgaatggtttttaatggatatgtaacaatgtttataatgtagtgttaaattaaaaaggatataaaattatatatacaaattatattctactatataatacatgaaagtacacataggtgtccaagtaaaatgcttctaatagcgaaagtggtgcaacttagtgtttaataatagttctttaaataattggcagtacatccataaaacataatattgtttagtgacttaaaattatttcataataatacagaaacttatggaaaaacatttaggctacttggttaagtggtcatattagcctcccagggctgcctgggaagagctccacaattagaaagcttaaaacaacagaaatgcactctgccacagtactgggggtcagaagtcttgatttcagaagtctgatattgaagtattggcagagccatgttccctttgacggctctagggatgaatcttccttgcctcttcctggtttttggtggtggctggcaattcctggccttccctggccatcgttctaatctctgccttttttgttacacagccttctccctatgtgtcttcacaatgtctgccttccgtgagtgcctctgtgaccaaatttctctcttcttataaggatatcagtcatatcgaattcgggcccaccatcctccagtgtgatctcaccttcctttaatgaattacatctgcaatgaccctgtttccaaatcaagtcacatgctgaggttctgggtagacaagaattttgggtgaatactattcaacctagtggatgaagtgaaaaaatagattttcaatatgtaaaattacttttactacttcaatacaaagttaaaaatgatggctgtgtgcagtggctcacgcctgtaatcccagcactgtgggatgccaaggcaggtagatcacgaggtcaggagttcgagaccagcctggccaatatggtgaaaccccatctctactgaaaatacaaaaattagctaggcattgtggcacgtacctgtagtcccagctgctcggcaggctgaggcaggagaatcgcttgaacccgggaggcggaggttgtagtgagccgagatcatgccactgcactccagcctgggtgacagagcaagactctgtctcaaaaaaaaaaaaaaaatacacacacacacacacacacacacacacacacacactcattactcattataatatcatacagaatagttttgttgccctaaaaaatcctctgcgcttcacctatttatctctctctcctctagctcctgataaccactgatttttttaaactgactccatggtagcaattgcatttttcagaactaattctaagggattcattaggtgtatcctttttgattcagtgatgctggtattcgccaccaattgtaatggtagaaattgaaagcaactgaatttcgtctgtgggaagctacttgtaagtgatgttatcaaattgatgggattacacttagtcactaaacataatgtatttactgataggaagcaaaggtttctcatacattaagtcaataacatctggttgtcaaacagcaggtaaaatataatctttttttttttgagatatagtcttgctctgtcacccaggctggagtgcagcggcatgatcttaactcactgtaacctctgccttctgggttcaagcgattctcctgcttcagcctcccaagtagctgagattccaggtgtgtgccaccacacctggataatttttgtatttttagtagagatggggtttcagtatgttggccaggctggtctcgaactcctggcctcaagcagtgatccacttaccttggcctcccaaagtgctgagattacagatatgagccactgtacctggccaaaggataatcatttttaaaaaacaaatatatgctatgctggtaacagtgcttgtgtctgtacgatggtcttatgagtaatctgtcttaaaattttcctcctttttgctttcttttcctaatttttctataatgactgtgtatcacttttataataaagaaaatcataaaagttagtcattaaaaattcataacgcttaactatgggtgctactgaaattacaaatagttgttattttcttctttatgttgagtctaatagaaaactgctatttgtatagattacaaaaagttaaatattggccctttaatttaacttacttttaaaaatattttctaaatattctacaggaatcatatgcctaaattcctcatatacctaaatttttgaaattcctcaaaagccttttgttaaaggattttaaaaaagataacatcatggttctcatacaaatctaaataaattcctgccaaggatttaagtcatgaatgaaggaatgggcaagatgttacaagagattcaatggagaactcaaagaacacgcatatatatgccatcatggacgctgaaaaatttacaaatagaagcaaaattggtcaatatctgcagggcaaaaatcgatgacttctcccccaaagttcacttgcatttccaggtatacaaactatctgcttgctctcatcttcctacagcttagagttgtaaatcccttaagagcagctcaggccctattaaatcagatcactccacaatcttcgcccatttcaacttctttttacaattttcctgatgttcctttttacacctgaagataaaaggcaaactcttgactgtgtgcttgggcctggcccctctgtgggctcgtctaagaccacccctcactctcacttccttgcattcagtatgtaccagcctcttttaacttcctaaggggtcccaggccccctggcacccaccctgctgcctcgatacccatcattctctctgccccaagaggtggtcctccccacgccccctcatcctacccacttaatgcctaaaatctgcccctcacctgagtacaaaccccctttcctcagggattcccagggcctctctccctccatcaacagttccttcagggccttgactgcaatttaaattacaacatgaatatgttttatgcaaatctaaactttgtgattttaaaatagcataggctaaaaatgttagtaaagtctctctttatgcttaaactttgaaataatgcaaatctcccaaattaccaaacaaaacaaaacaaaacaaaacacacacctcaaagcaaaagtctctcccaggactgtacatttttaaagctgcatttcaaaacctgcacgttgtgaacatgtaccctagaacttaaagtataatttaaaaaaaaaagctgcatttccaaagagtggtaaatagggcttcctctcttgccccagtgtggcctctctgtaactggtcaatagaaacagtcccggcccggggtcaccgggttggggaccctgtacttgctatggaacttccgagagtggctattactaaggcatatgcattgttgttgtagcactcattgttatcataacttaacatcttccagaagctctaacaatattctccagtagtggtgctgaggctgaggctgaggccgggcatcttggtgaggggagtcagatgggatcagtgctttgctggccagccctcacaactcctggtgccgactgacgcatgatgacagaggccaagagattacaaagcacacagggcacaaatgcactaccctgacctcagatttctattcctatggcacattgttctggagttatttgaattatgacttatgctaggcctgcagagacatggcccatggataagatgctacaaccctgtgtatatttgtgagattattcggctaatatgttgtctccctgatctgtctgctttgttcaccatttttcttaccagctcctagtagaagggaaaaaaatatttcctcttgttcgtgtgaaaaaaaaaaaaacccctcaccactcaatgtgctttttcctgttctctcattcaacaccgtaacaactagcacagacttctgggtggggttggggttctccaacacaaattggcaggggtggggttctccccaccaccgagcaagcactcagctctgcactggacagtggctgggtgtcctgcaattccattctgacattttctacttggagacagctcagatcccacagggcgagggctctgttacacaagacagaccccctgtactttcccaccgatctgcatgtccaggcctccagaacttctgaccgaccggcttcaagctggagttcccacaatcccttcttttggtttaatccatttgctagaatgactctcaggaaaacacttgtttatgtttaccggcttatgataaaggatattgcaactcacaccatgaagatgcgcagggcgagggatgtgggaaggggggcggagcttccatgccttccctgggtgtgtggccccccaggaacctccatgtgttccggagacgtcattggatatgtatcgttgcagcgtggacaggtgtgttgaaatgagactgggcaaaaagggtttggtctaaacccagcagggcctgtctgttcacattcttttggcctctctctgcagcattccttcctccaagggatgcggcaggaccctttctggaatgagggccttatgacccacaaacaggctagagttcggctatgggaaggtgaaaggagagtgggagtaggtcagagagagagattctgtttactcaagagagtacgcagaagggtgatgggagttatgagccaggaaccatgggtggaaacctattgtgtgtatatatctatgtcatcgatatctatttctatctatatatcacacttctactctcttacattcagcagctgatgcattagtctgttttcatgctgctgataaggacatacccaaggctgggaagaaacagaggtttaatggactcacagttccagggggctggggaggcctcataatcatgacagaaggcaaaggcacctctttcatggcagtagcaagaaagaatgagagaagtgaaagcggaaaccctttttaaaaccatcagatcttgtgagacttattcactaccatgagaacagtatgggggaaaccgcccaacagccgcttgattcaattagctccctctgggtccttcccacaatacgcaggaattaacggagctacagttcaagatgagatttaggtggggacacagagccaaaccatatcagctggcaactgtgaattaaagtgacaaaacatagagtcacaggagaaaaggcatacacattttacttgataatattttaatttttatgtgcgtggaggccttcaaagaaagtggagacccaaacaagtggttcgatttgggagcttagataccattttagcaaagggcaatacactgcggagaggtgacaaaggaaaaggggtttgggcttctaggggtggacactgggcgagtagacacacaggtgaaagttgtgaaagattgggtcattttgcaaggtttaatccatgcagactcatctcggtgctgtctccttctctggtgatagaggtcgttcttatctccctcataggagggatgagggtacatcttcacaagggaaatttatgccctcctctctggcagatacgaggagggcagaagctttttttttgttttgagacaggatctcactcttctcacctaggctggagtgcaatggtgcaatgttggctcactgcaacctccatctcccgggttcaagcaattctcctgcctcagcctcctgagtagctgtgattacaggagcccgccaccacgcccagctaatttttgtattttttgtggagactgccgccacgcctggctaatttttgtatttttggtagagacggggttttgccatattggtcaggctgatcttgaactcctgacctcaagtgatccgcccacttcgacctcccaaagtgctgggattacagtcatgagccattgagtcccgccctctttttctttttttcttctgcttttttttttttgcagttgaaagatttaatagagtgaaatagagtgaaaatagagctcccatacaaaaggaggagacccaaagggggttgccgttgctggctcgaatgcctgggtttatatcccaatcattgtccctctcactgttctctcaggcaacagatgattggttatttctttatctccgtttttgcctaattagcattttagtgagctctccttactatctggttgggtgtgagctaagttgcaagccccttgtttaaaggtggaagtggtcaccttcccagctaggcttagggattcttagtcagcctaggaaatccagctagtcctgtctgtcagtcctctctctcaacaggaaaacccaagtgctgttggggaggttggcgatgactgctctaactgcttcctgctggcctggggtgtagtaggggttgtgcagttgagatttcctcaggaggggtgccttcgatgtcgttaacattggagcatgggctgtcagggtggtccaggggtccgcggtagatcttagtcatggactgcatctggggctccatttgaagaatgatttgtagttttacagctttaattctggaagagacaaacttaacaaggaggttaaagatacagggattcaaatgtatggcctggggatacttctttggcacactttacaggccccaactatctgcttgagagttttgaaaagtcctggtccagtaaataacaatttggccatctgatgggtgctatcaatgcataagtgaaagttttggtgagtggttttaagtaatttccattggttagctgcaggcaaaggtatttttccttgttcggtggcttgccatcctgaggggagaaaactatgtcctcgtgagattccccattctatttcttcttctgaatactggggcttggtttcccagaggggattaccccatactaggggtccttctataagcatttctaatggagggtcctgccttgcagctcttttggcttcaatatctgcttggcggttcctttctatttccctttcctttcctttctgatgaccccggcagtgtaagactgccacctctttaggtttctgtacggccaataataattccctaatggcttcctgatgtttgataggtgttccctcagaagttaggaattccctttctctccatattactgcatgggcatggaggactaggtaagcatacttagagtctgtatatatatttaccctttttccttctcctaattctagtgcccgagtgagttttgccagctgagcactagttcctggagtgaggggattactttcaagtattccattatcactgactactgcataccccactttttgaagtcctttttctacaaaggatcttccatcagtatacaagttagggttgggatcagtcaagggaacctctaaatggtcccctcgagtggcataggtttgagcaattacttgttgacagttatgttctatcttttcttcattgtgtggaagaaatgtgtccaggttaagagctgcacaagtgcacagtcgcagcattggcccttcaagtaatagagcctgatatttaagtaaatggttgtctgacagccacaagtctcctttagcagtgagtatgccattcacatcatgagatgtccacacagtaagatttcttccctgtattattttaactgcttcagatactaagactgctactgccaccactacccgtaaacaatgaggctgaccctttgccactacatcaatttccttactcaggtatgccacgggttgcaaactcgtccctcagaccagcgcaaggactcttagagctattcatgtttttttttttctttgtttgtttgttttttgtgacatatgaggaaaagtcttgccccgttagcaagcttagcactggggcttgcattagggccttctttagggcatggaaagctgcttctgcttcaggtgtccatcttactaaatgggtattggctttctgagtttccttaattagcgtatataacggtctggctattttgccgtacctgggaatccatattcggcagaaacctgttatgccaaggaaccctcttagttgctttagggttttgggataaggataagccagtataggctggatacgttcctcactgagggccctggtgactttggataattttagccctaagcatttaacctgctgtgagcagagctgagcctttggtttggaaaccttgtagccacaggtagtgaggaaatttaagagcgcttgggtggcttgatggcacaaggtttctgaacgggcagctaaaagtaaatcatccatgcactgaaggacaggagtgtccaggtatgagaactggctcaagtcttgggctaatgcctggccaaatagatggggactatccctgaacccttggggtaaaacagtccaggtgagttgagatgttgggtttgaaggatcttcaaatgcaaacaagaattgagagtcaggatgtacagggatgcagaaaaaggcatccttaagatccaggactgtaaaccactctgcttcctctggtatttgggaaagcagagtataagggctaggtatagctgggtatagaggaaaaacagcctcattgataatcctgagatcttgcactaacctccactgtcttttgggtttctgtactcctaaaattggagtattgcaggggctactgtatggttttactaggccttgggcttttaggtccttaacaatcttttggagtctttgttgggcctcgggtctgagggggtactgcctttgatagggaaaggaggtggaatcctttagtttaacttggacaaaatgggcattctttgcttgtccatattgtccttctgttgcccagacttcaggactaattccttcctcaaacaggagacgacaaatgggtgttccttctcctatgttcaggtgtataatggcccctgcttttactagaatctctctctctaacaagggagtgaggctttcaggcataattaggaaagcatgtgaaaagggtaaagctccccagtcacaacttagtggctggaagaagtatctagtgactggctgtcctaggacccctcggatagtgacagatctggaggacagttgtccgggacaggagagtaagactgagaaggccgcaccggcgtccaggagacagttaacctcttggctctcaatggtcaagcatacctggggctctgtgagggtgatggcatgggctggcgcttgccctgggcaccctcagccctgctgctggatcatctggttagtgtcttctgactcagaggaccttcatcccctggggcagtgggccttccagtgattcccttgacataaggggcatggacaagagggcggcttacttctacttggacaatcttttttaaagtgtccttgtagaccgcactggaagtaagccctattaggcattcgatttgcccagcttttcccttttacagagcctccaaagtccacttgcctgagggccatgactaaagtgatggccttttttttatcctgtttgtcctgttctgcctgctcctcctgatctctattataaaaaagcgaggttgccaagttcaatagggtttctaagttttgctccaggcctaagacagacttttgaagttttttcctaatgtctgcagctgactgagtgataaacttatcctttaagattagttggccttcactagagtcaggtgacagggaggtatgcttcctcaatgcctcccttagtctctccagaaaggcagtaggattttcttcctttccctatgctatagtgtacatcattgaataattcacagccttcttcctagttttccttagtccttctagcacacacgtgagcaaatgtctgcggcaccaatctccatgttctgattctgtgtgccagtgagggtctacactggggactgcctgctgccctgtggggaatcattctctttcttctgttgtcatcctgtcattgacctgactgagataccagagatcgccaaactctcaggctgcagtaatggtggcactttttcatttggggttagtgtctgatttagcagtaacattatatctctccatgtcagatcaaaggattgtcctaacccttgtaaaacatcaatatagccatcagggttatctgagaatttacctaggtctattttaatttgctttaagtctgagagagaaaaagttacatgcactctggctgggctgaattctcctcctcccgctgcttggagggggcataatcggggaatattggcactctttggttcattgtttacccctttgtctatctccttttggaccatttgggctgaagagggggttcttattagttggggaaggagtcagggggatgttggggtagggaggtagattctgagggcttcctgtagggcataagtcatactttttgcataactgcgagttgtctcttaatgaaaagaaagtttgtacatatggcacttcactccatttgccttcttttctacaaaagaggtctagctgtaagatggtgttataatttatacttccctcaggaggccagctttcttccccttgaagagaatatcacggccaggcggtactgcagaagaatataagtcatttctttcttagcgtctgagggtcaaattggtcctaattctccagaatacatcttaggggcaattttgccttggggggaacgtttcccatctgaaaaaggaacatagggatgccagcatccctagtcattttctgatgagcattagtcctagagtgtcctctgtggtcctaatgcttattcctttccagggtgcgtaaccacccatggacctctgcttatcggattagttacactcaccgatgtagcagtcctgcacctgttttcccgcctttcttgaccacaaagaaaggggtccgggctgctggattctagtggtcctttaccagcgtgcccaacattgcctttgcgctcaggagtgagtcctagagctgggctgggttcctgagtatttcataacaacccagctgccccatcaagatgcattcccataaacaacagtttttatgcaaattcgtttcagagagggtgtagcgaaccttttgagtcaggattgagatagtcttttgattctgtaagtactttaaggcttggctgagtgcaaacagctcgcacatttgaggagaccaattattaggcaatttttctaactctgcttccacaagagtctccgtatcaattactgaatacccattgtgttttttacctcaatcacctgggaggaaccatctatcatcctgtcctgaaggaagatcctcctaggtctggtcggacctttgtatggtaattaagatgtaaatcccctgttagaaaatctgctgggttaagggaattatcagcggttggagttacattacttttttctaacataatggccccatactttaagatttttgagttagtaagctacctctttgcttttttgacttagactaattctgaactggtgaggtgtgctcacagcgaagtttcctctaaaagttacttttctacttttagcaaagcagttgccgctaccaactgaatgcatttggctcatccgtgggttactgggttaaggattttagacaggaaggctatgggttgtcagtggcctcagtgctttcgggctacgcccttatttacactgacaacaaagtggcattggagtgttataggttcatagagaagatcttcaattatcaattatgggtttcaaatttaccctggcttttaaaggaatagggcacacttttttttttttaactatttctttttctttcttttactctttgacttccttggaatccgtgaggccaagaacctgcctctctgtctctctctctctcttcatctctctctctctctctccatctctctctctccgtgtctctctcttagccattacaaacttggggccctggcaagggtggtggggaatgggtcctgcataactgctcatgtcaagagctgtatacctaaattaggagggacgccagggataagactccctgggctatagcctaggtgcctgaggacgcagcgtagggcttccttagatccctttggagatacaacctgctagaggaaatgaaagtctgaaccattagtacctaggaggcagggatcagaggaagtagattcagaggtaaggagaattttggggctatactttcaagaaagtcgtgttcgggacccaggaggtatgggtcagaaggaaaggtaagggcgcatgcgtgggcgactgttgagtagagacttctggctgagccatgatctcaatcagctactgctgggaggttgggacgacagctttctgcctctagttggcccttggtttccccaagaaaattgaaagtggaagctggctccaggcagaccaatgtccccaacaaccccagaagggttgggggttgttagaaagcccttccccagatagcctcacacctgagtcttaagtcaggcggccacgctaatcgtttttaactggccgacaggtgtccggtattttcctccacctctaaggaaggctaggacagtatagcaagcgaaagtggtccaatattactcactgctttggatgtcccttcgtggttgccaaaatgttacggggggtggggggtccttgctcccagagctcccaagatggtggtgagccacttccaagatggcggcaagcctcgtgttctctgacctggggttcttggcctcacgaattccaaggaatggaatcttgggccatgcggtgagtgttatagctctattagaagctgtgggtcatgggagagaaccatggaagccagtgactagtgtttagctcgattaggatgaacccaggcacttagccatgcaggaacaatggcgagcctttagcctgattggaagtggcaatgggcgcctcactggatcaggagcacagcagatactctgccggatctggaggaatggaagtcagcggcgggtctgcgatggtggcaaacagcagtggtggacggtgagtgaaagctcagctcgagccgtaacaaacacggaccagaagagtgcagttgcaagatttaatagagtgaaatagagtgaaaacagagctcccatacaaagggaggggtcccaaagggggttgctcccatccctctttttctatctctactttttctcaattatcttcagctcaaaataatttatatgccaaaatggcttattttggggtggcatatcctaatccctttcagcatagaggtttatttttttgaatcaataactgaggaataattattcttactaaaacccaataattcaactcagaagggtcttccaaagaaggtggtctcccagcatgctctgggttctgtttgcttgctgatggaacacagttaacagttaacacagctcacgggactcctgatgcttgcgtgctgtgaataataagacactttcggaatgggggctcagcacactgtcagggctctcagagtttgccattgttatcattattattattagctatcattgtttttattgcctactattacaatttctaacatgcctctattcgcccttcaagtgagtaaaacattcctcaggacttgcctggcaaaagcaccttggagaaattcaggctgctggtgagggtctagggctgaccccagcatgccctaaggaaggtcagcccaagggcaggcacttggcttggttagttgctttctcctgcctaggctaagtgttaagtgctctctgaatagccactgcataaaattagtggataacacaactaacctggtgaattagtctgttttcacgctgctgaagtcatacccgagaccgggaagaaagagttttaatgaactcacagctccatgtggctggggaggcctcacaatcatggccgaaggtgaaaggcacttcttacatggcagcagcaagagcgaatcagagagccaagcaaaagggatttccccttataaaaccatcagaactcatgagacttattcactaccagagaacagtatggggaaactgccgccatgattcagttatctcccaccaagtccctcccacaacaggtgggaattatgggaggacaattcaagatgagatttgggtggggtcacagccaaaccatatcacctggccacatggcctggggggttccaggaacctggaagtggacttaactgtaataccaaagaagaagctcctctgccaacactgacttagcagaactgtttaatgaattaattacttaggaatgacgggagttacctccaagttaataaggatgatgaaaattcattatttacacaaggaaacccacagaaccaggcaagagaccacctaaaattttgttcacctaaaattctagagttctttgagcaaaccaaatgagtggttgtatcattttaaattaacaggaatagataggaagtctaggtcattaacataatttgtgctctcagttcatttttcaagtgggcttcctattgcatttttcttctgattcagttgagctagggtgacaactcctaaatgtgtgatattttcagctaagtgctagtgtccaaggacaaggcaactctggaaagaaaatggtttaagtgagcagtagccagagaaacagagtgcacatgaaaaactctggcaaaaaaaaaaacaaccgattcctgttaaaaatggcttttaacactgaagcactgaaggattaaatgttcataatttagaattgatgattataccagattttcagatatggccattttctgtggagggagaaacactactctctgtcagttttgactgctacaacagaatactagaagcagggtgggttaaatagcagacattcatttctcacagttccagaagctagaagtccaaggttaaggtgccagcagagtcagcgtcttggtgagggctctcttcctggcttgcaggtggcttcctttttgctgtgtcttcacatgacttttccttgaagtgtgcaagtgaagagaaaacaagatctttttttttttttttttttttttttttgagacagcgtctctctctgtcacccaggctggagtgcagtggcgcaatctcggctcactgcaacctccacctcctgggttcaaacaattctcctgcctcagccactggagtagctgggactacaggcacgtgccatcacatccggctaatttttgtgttattagtagagacagggtttcaccatattggccaggctggtctggaactcctgacctcatgatctgcccactttggcctctcaagagaacgagatcttataaggacctgagtcccatcacgagggctccattttgaggaccttatgacctttcaaaggcttcatctctaaataccatgacattgggagtgagggcttcaacatagcaatttcgggggaacacaattccgtttatagaagctagaaaataatgtgctagttgtggaaaggaatgattttcacactataatttttttattttaatggagtggttgtggtcaactgaagttccaccagaaaacagccagtgaggttagaagtaagcctcagcactcactgaattgtgacgtgcagctgaagtcatcctgagaaagttgcattggatgacaaaaaggatacaaatgagacaagtgtctggttattgtataacacacacaaaaattaacttttctgctatcttcttaggttcagcaccaggcgcctgtggaagaaacataaaagacaaattaacgggagaaaaaaaatgtttatgccttatgcatatgggagccaacaaaggaagtagctggctcattaatagagttaaagagttaaaaggcttatatatctaacgttgtaggggaggagaaggggggagaaaggcttcctatagaaagaacaaataggtttcttttggaaagacaaataggtttttttttttttttttgaaacagaatctcgccatgtcacccaggctggagtgcagtggcacgatctccactcactgcaacctccgcctcctgggctcaagtgattctcctgcctcagcctcccgagtagctggaattacaggtccacatcaccacgcccggctaattattgtatttttagtagagacagaatttcgccatgttggccaggctggtctcgtactcctgacctcaggtgatctgcccgccttggcctcccaaagtgctgggattacaggcatgagccaccgtgcccagccggtctcaatcaatttagaaagcttattttgccaaggttaaggacgcacctatgacacagcctcaggaggccctgaaaacatgtgcccaaagtggtcagggcacagcctggttttatacattttgtggaggcatgagacatcaatcaataagtgtaatgtgtacattggtttggtctggaaaggtgggacaattccaagtgggggcttccaagttgtaggtagacaagagacacaaggttgatcagcctctcactgaatacacaatttacatgtgagagaggggtagaggaataggcagttatgccttgtctgactcaatgaatctgtatttttactaagcaatacggcagagaaagcaatcagatacacatttgtctcaggtaagcagagagatgactttgagttctggcctttgctccgcacctgtgaagatcagctacaatttacattgccagggtgaaattcaacggaactgtttttaaggtaaagatcttgaggcccacaagggaatttttctcatgggcaaattgtgaaggaggtatgcagctttttcatctttatagctatcttatttaggaataaaatgggaggcaggtctgcctgatacagttcccagcttgactttctccctttggcttagtgattttggggtcccgtgatttattttcctttcacaccttcaactggaaggaagagcattcttcgcctcccctggccccatttacttgcttcttggtctttaaatatgttagctatatcttccattggtgcctattacatgcagaaatccttgattctgagttccctgacaagattatcaaaaaggaccattaaaaaagcagacctttcactgggtgtggtggctcccacctgtaatcccggcactttggaaggctgaggctggaggactgcttgagcctaggagttcaaggttgcagtgacctatgatcgtgccactgcactccagcctgggtaacagagcaagacactgtctccagaaaaaaaaaaaaaaaagcagttcagtatggtgctgaacatcaggttcttgggacacagtcttccagaactgtcacagtgctctgcaaagccacgttcctgtgttcatctcctagcacttgagggtggggggttggagctctgccctatccaccagtcctccagcaaatgccatggaagccacacttactcctaatggctgtctcatccagaggacgcaccctcgggacttttttctttcttaagaggatttgttcttgtggatgtcaaggtgcctggctgggagaaggagccagttccaccagccgctgggcctttgctggaggcaaggtcagtcagccaggcagcatgttttgggcaggaaggatctgtcagcctccagctggtggaagaggaccagggcgggagctgagcagtgccttgactccgaaggacttggaagaggagggagagggagtggaggccggagtggagaggatagactggccctgaggcctctgcgttcccagcccggggcctggacttcctgtgtttggctgctgtttggagcttggtgatgattaatgaggaaatacgcactctgaagagcttatacctccctggactgtgaggccacatctgcatttataacacagtctgtgatgtgacagagccatttcttgaggaactttggttctggtgaggcagcatcaggactctctagaggccagacaagagtgtgtttctacatttgtatggagagaggacaagagccacgaagaggcctttaggaaatgaagcacccttgctgaagccctccaaagggtttacctgtcatctggggtaagacaactccagtttgtggctcccctgtgacaggtgtttgtcaagtgagtttctccatagggcccctcaagccccgcacaggccgttatctgggtttcccaggaaagttctggacatttgcacacatgatcttcgctttccaacttccacagagttaaaaactacaagcgtgggcttctctgagaagttcagaatttctggatggtttctactcagtgagtgtcgctttcacagtgaactgttcttgggatgggttgaaagctgagacttggctgaaatttgatgggctggggggggtggggtcaggattcaattaatagaaagtttttaaaaaaacttttaccgacttcgagggtacaaatgcagttttgttacatggagatattgtgcagtggggaagtctgggcttttggaaaggactgactcatgacgtctgccattcattggacaagcttgtaaatgccttttccaccctctaatgagaagccttagggaaagtagaattctcccaaagtctctggaggttctgagaaggccgaccctgaatgcaagatgctcagagctggagtcttccgagtgcaggagaaatgccagcacctttttattgagccgtggcggtgtccaggttgctccttagtcccttgcgtggtttttgttacagctatttctttcttctttttttctttacttttaaaaaatttcaatagtttttggggtactggtggtttttggttacatgaataagttcttaaatggtgatttctgagacgttagtgcacctgtcacccgagcagtgtacactgtgcctaatatgtagtcttttatccctcaccccgttcctccctgagtccccaaagtccattgtgtcattcttgtgcctttgcatcctcatagcttagctcccacttataagtgagaacatatgatgtttggttttccattcctgagttacttcacttagaataatggcctccagctccatccaaggtgctgcaaaatatgttattttattcctttttttttatgactaagtagtagtccatggtgtatatataccgcattttctttatctactcattggctgctgggcatttaggttggtttcatattgttgcaattgcaattgtgctgctataaacatgcatgtgcaagcgtctttttcatgtaacgacttcttttcctttgggtagatacccagtaatgggattgctggatcagatggtagttttacttttagttctttaaggaacctcctactgtttttcatagtggttgtataatttacattcccagcagtgtaaaagtattccctttcaccacatccacaccaacatttatggctttgtcttttatgataattcttgcaggagtaaggcagcatctcattgtggttttaacttgcacttccctgattagtgatgttgagtatttttcatatgtttgttggctgtttgtatatcttcttttgagaattgtctattcatgttctttgcccactttttgatagacttattcttttttttttcttgctgatttgttttagttccttgtagattctggatactagtcctttgttggaggcatagtttgcaaatatttccccccactctgtgggttgtgtgtttactctgctgattacttcttttgctgtgcagaagctttttagtttaactaggtcctatttatttagtttttgcatttgcttttgaggtcttagtcattaattctttgcctaagctaatgtccaggcattttttctgatgccattttctagaattcttagagttttggatcatagatttaagtctttcatctatcttgagttagtttttgtataaggtgagagatggggatccagtttcattcttctatgtgtggcttgccaattaccccaggatcatttatttaatagggtgtcctctcctcaatttattttttttgtatgctcggttgaagatcagttggctgtaagtatttggctttatttctgagttctctattttgttccattagtctatgtgcctatttttataccagtaccaagctgttttggtaagtatagccttgtagtataatttgaagtcaggtaatgtgaagcctccagatttatactctacagttgttgggaagaatgttctgtaaatatctgtaagttccatttgttctagggtatagtttatgtccattgtttctttgttgactttctgccttgatgatctgtctagtgttatcactggggtattgaagtcccccactattattgtgttgctgtctgtctaatattgtaggtctagtagtaattgtttttaaaatctgggtgctccattgttaggtgcatataaatttaggattgtaatatcttcttgttggattaattcttttatcactatataatgcccttctttgtctttttttttttaactgttgttgctttaaagtctgttttgtctgaaataagaatagctacttttgcttgcttttggtttccatttgtgtgaaatatctttctccaacctttcaccttgagtttatgtgagtgcttaggtgttagctgaatctcttgaagacagtagatatttggttggtgtttttttgtttttttttagtccattctgccatttttaatcttttaagtggaacatttaggccatttacattaggtcaatattaagatgtgaggtactgttgtattcatcatgttagttgttacctagatacttctatttttaattgtgttattgttttatagaccctgtgagatttatgctttaagcaggttctatttgggtgcatatcaaacttctgtttcaagatttagaactccttttagcatttcttgtagtgctggtttggtagtggcaaatgcctttagcattttttgtctgaaaaagactttatctctcatttatgaagcttagttttgctgggtataagattcttgactgacaatcattttgtttaaagaggctaaagataggacttcaatcccttctggcttataaggcttctgctgaggaatctgtatggctatttcccaccaaccttgagcaggcacttgccccctgttgtttgtttttgagcttcttgccgttgccccaaacatgacattttctgccacttttgaagattccattatcaagccatttccaataatccaaaaataaggggctgagtgcgatctcaaaagcaccaattttctttctgagaggactagcttggtgagtcctggctgatcttctgagtgtgtttgcctctcgtcaggacagggaggaattggtgggtggctaaatcctgtctatttaatacagtttaataagactaaagactttaagaataaaagatttttcaactaagtgtaggtaattcaagtctgctataatgaaatgaaagacaagttaaatctcaagtcctgttcagactaccccatagggatattcatgaacaatacccggcatatgtctttaattaaagcagcttgtctgatttcagttaaacttgaaatcagctttatgacagtgttccaactgcatacacccttcaaatgctatcccctctcaaatccatatctgtagcagcctcactgcttggttcctggagctctgagggtgtttttgcactgcctgccctgtgattctgctagactcctctttcatacagagatgaaatgtggatgacatgtgagggtgttggcagaatggagtgttgagtaagttaagcaatctattcttagtctgttgcctgactctacctgcttgtcggggactagaagtctttcctaacagaccttaatctattgctgtgtcgttttctgtaacactgggttcacacttggcagtgactgcttttggtaaaatatgtaattttttataactggacgactcaatttctccttcatcctctgctagagcctgacattccagatgactacttgtggagttgtgttaatcgaaccttaaaaattattaaatgatgacctggtgcggtggctcatgcctgtaatcccagcactttgggaggctgaggcgggcggatcacaaggtcaggagatcgagaccatcctggctaacacggtgaaaccctgtctctactgaaaatacaaaaaaattagccgagcatggtggcaggtgcctgtagtcccagctactcaggaggctgaggcaggagaatggcatgaacctgggaggtggagcttgcagtgagccaagatcgcaccattgcactccagactgggtgacagagcgagactccatctcaaaaaaaaaaaaaaaaattagtaaatgatttatttgacacttcataattctggattttggatcaatctgggaaggctgtgatttcattttggtttgtgcacagctgttgtacaacttgctactgaggcatatgtgtagggatttgctgagtctattgtagattattgcaaggggctgggtcccacagtgaaatggtgctgcagcacaggtatttcaaaccttatattaaattacgggctgggagtggtggctcatgcctgtaatctcagcactttgggaggccaaagcaggcggatcacctgaggtcaggagtttgagaccagcctggccaacatggtgaaactccatctctactaaaaatacaaaaaaaattagccaggcgtacttccagctacttgggaggctgaggcaggagagttgcttgaacctgggaggcggaggttgcagtgagccgagatcgtgccattgcactccagcctgggcaacagagcgggactcggtctcaaacaaacaaacaaacaaacaaacaaacaaacgaaagaattacagacacaagtagttatagtttagtgcacacgttgaattttgctttctaaagacctcagagaaacaaaggggtggaaaccccacattctttctcgaggctgtgaatacccagtaatgcacttaaatgctaaatgcaggtcatgggcctgagaatctttgctgtctttcacgctgacactgtgggtttcattcagtaacttggatgagatgtccgcagatcaaggtgtggtagttgttttcccatcacagtttcaattcttgtatttttgcttctgggttggctgtggggtctgccttctagggcctgtcagaaaagaaaggagactggagccctggatgtgcgttgtcagcacattataaagtctctcctcaaagtccctgatgggacctgtcacctcatattctggagggacgggtggacgagactcgcagggctgtggaatgtgtgtagatgccaaagctgaaatgagaaccgtccgggtcactggactccactcattggtgctgtggaggaatgtttgcaataaagagaccctttcctgaggctaaggagtgttgttttgcgggtggttcatgacatgttcagcacataggtgatctaaccctgaatcttccaggaggatacatcagtactggggagtgtcttggataagcctctcctaggggagagaaaaaagcaaaaaggaaaaaatgcaagggtggagggtgaccaagagggcatcaaagaacaaagggggttggaaggaaggaacaagaggtatacatggcagaatccttatgtgctgtcaatggtctggccaggctttaccccatctatcctggcctccctgaactctgacctcactccttccacccacccctgtctgccacagagccttctctgcagttcatcaagcacagcaggcacagtccccccgagagccttagtacctgctctttcctctgctgggaaagttcttcctgcaggtgtccaatgcggcggctgttgtctcacctcattcgctgtgcatggtgcaccttcccgggggcttttctctgactaccctgtttgaagtggtagctggtccccctccttgccctgtttctccccacacctattgccaccttctaataggccatatcatctatttattcattcggttgcctttccttttgagaatgtgagctcatgagggcaggagttttttctcagtgattagtgattgaaacgaatgtaataagcccatgatctgcatttggtcaggcattcagaggtgaggctacaccatctgcatcccttcatgatgcaggtgggctggcgggtggtgtaagacgatttcaaccagtgattctcaaatttgaccaggcaccagaatcacctggagggcttctttaaatccaaaattctgggcccacaccaggggtttctgtttcaggaggtctgaggtggactcagaaatgtgcattctttttttttttttttttttaagagtctcgctctgtcacccaggttggagtgcaatgacgtgatctctgctcactgcaacctgcgcctcccgggttcaagcgattctcctgcctcagcctcctgagtacctgggattacaggtgcataccaccacacctggctaatttttgtattttccatagagatggggtttcgccatgttggccaggctgatctcgaactcctgacctcaaacgatccacctgccttggcctcccaaagtgttggaattacaggcgtgagccaccgcgcccagactgtgctttctaacacttcccagatgaggctgcccctgtccacactgagatgcgctgatccaatgtgtccacgggcacacaccagctgcggggggtggaggtggcggtgggcacagaagacttctgaacggtagatgcttgtcagtgatgggttgttgcctgcttgctttattttcccggggccaggaagaacatatggaggtgcagggctgagggaaagctgtcctgactgtgctggtcgtcctggcacgtagggatcgcctgagcttggtgggctgttcaccaacgtccacttggagtgtagggggaagacaagggccacaggaggccgctggaacacacaactgccagaagggtctttctcagcctcttcccactgcatcccttcccatggtgacctcttctgtggggcccatttcctcctgcattgactcgactcccagaacggtccttcaggtgcaggggatctcccccatcctcaccagggccatcactgtcctgggagtctgcattaggttccttcccacaagttgttgcacctgctgaaatgtcccttcccctccctcgtttctcacctcttcaatttctatctgggcttcgaggaagacctgactcagaaatcacctcctccctgaagcctcctaacccttgccattttcagggcgagaatctcagtttccatttactgacagggtaagggttctgttgtgtgtgacacttcctcttcctcaccaccccagcgctctccaacggtgtcagctggagtgaactcctgtgtgtgcaaggcctgggtctcctggtcagactactttctatgggaaaggcatagtgtatagtctatatactatacataggggtgctgggaggaactggggttttcacagccagctttggttttcattaggtttgtttagtttccattgcttcaggggtgttagttttgtgttcccaactagattataaactcctcttgcattcctgatggcagtgacttgaaggcatttatttgaagaataatagacatacagaaaggggcgcatgtcataaaggtacagctggacgacttttcacaaagtgagcacatttgtatgatcgatgttgagaccaagagcattcagtggacaactcctttccagttactccaccccactcccagtgaccatcattctgacttctaactgtgtagacatgttttgcttgttttgtactttacaaacatatctactctattttaggtggctagacaatgtgttttacaatgctggccatgacagtgtttgaaagaataaaatggaatcaaatagaatgggcagtatcagagtgtgttgcctgcctaagaaatgttttgtgacattttggctttgggtctatttacacattaaatctaagagcaccagaatgtggtgtcaaaatgtgtttggggatgaagatattctaaagtcctgtagtaagcaatgcaaaacgttctggaggtgtttattaaacatttgtttgtagaatggagaggaagacaaggtccctgcttgtgtagagcttagggactgactgtagggttaacaaaccacccttaatgtacatcttaggcatatggcactgtatgggcctatttcagccgtggttacaaaaaactcttctaaaggtttggtgggcagtggatgaactctgggtctagtgtttctgagatactttttcctgaaaaagctgaggcaggctgggtgtggtggctcacgcctgtaatcccagcactatgggaggctgaggcaggcagatcatgaggtcaggagattgagaccatcctggctaacatggcgaaaccctatctctactaaaaaatacaaaaaattagcagggtgtggtggcacgcaactgtagtcccagctactcgggaggctgaggcaggagaattgcttggacccaggaggcagaggttacagtgagccgagattgtgacactgccctccagcttgggtgacagagcaagactccgtctcaaaaaaaaaaaaaaaaaagctgaggcatacgtgctgtcttgagggtatggaggatctgggttgaggcctggaggtggctatttcaggagaggagagtatatatgggctaattctagagctcctgagggtccatcccaaaatttgtaatgaatgcaaatttgtaatgaataccaaagcgttcaaatgcttcatgttggaaagtcttatgggtggagtcattttcatttgtagatatggctctgaatatccattatcaacctgtgtgtgcacccataagtctcttcccagacctctccttgccaccattcctactgtataatgggttatatagaactcagccaccatgtttattcactcagtacatattcactgagtagttgttatggatcacttctttgtaggcactgggatgtaagattgagcaaaaccaggcattgttcttgttgacatagaacttagagcccagtagggaaaacaggcattaattgtgagcaaaagtaaatacaaaacaactactgtgacaattgtaacccccgaacaatcaggccaggggttagagactgcattgcaggccggtcactgcacatgtgagagccctgaggccagaaagagttgatgaggttgataaattaaaggaggtctggtgatcggagggtgaagtttgggaaaaattgtagctggagagagagttgatgtgggactaagtcaggtcttttttttttttagacggagtctcactctgtcgtcaggctggagttcagtgacgtgatctcggctcactgcaacctccgcctcacatgttaaagcgattctcctgcttcagcctcccgagtagctgggactacaaatgcatgccaccacgcccagctaattttttgtattttgagtagagacggggtttcactatgttggccaggatggtctcgatctcttgacctcatgatccgcccacctcggcctaccaaagtgctgggattacaggcatgagccaccttacctggctgtcaagtcttaaaatatgataatgttaaggattatctgtttttatcctaaatgatggaaatctttcaaacaaagtctgggcaatccttagcaaaaagagcaaagctggaagcatcacattacccaacttcagcctatacaacaaggctacagtaatcaaaacagcatgacactggtacaaaaacagacacatagaccaatggaacagaatagagaaccctaaaataaacccatacacctacaaccatctgacctttgacaaaatcaacaaaagtaaacaatggggaaagaactgcctattcaataaatggtgctgggataaccagctagccaaatgcagaagaataaaactaggcccttacctctcaccattcaaaaattaactcaagatggactaaagatttaaatgtaaaacttcaaactatgaaaatcctagaagaaaacctaggaattatccttcttgacattggctttggcgaaaaatttatggctaagtctccaaaagcaattgcaacaaaaccaaaaattgacaagtggtatccaattaagctaaagagcttccatgcagcaagagaaattgccaacagagtaaatggatagcctacagaatgggagaaaatattcacatattcacaaactatgcatctgacaaaggtctaatatccagaatctgcaaggaacttaaatcaacaagcacaaatcaaataatccaattaaaaaatgggcaaaggacatgaacagatacttctcaaaagaagatgtacaagatgatggcatgaataggagaaagggaatctttcctttccttttctttttttgagacagagtcttgctctgtcgcccaggctggagtttagtggtgtagtcatagcttgcggcagactcaacttcctggccttaagcaatcctcctgtcttggcctcccaaatatctaggaccacaggcacatgctaacacacacggctatttttaatttttttgtagagatgggatattgttatgttttccaggatggtcttgaactcctggcctcaagtgatcctcctgccttgacctcccaaagtgctaagattacaggtgtgagccactgcatccagctgaaagggaatcttttcaatggtgggtggcaaccagttgtttactcggagatgcctggtaggacaggagagaaagcaagagggcagggctcgagatgtggatttgagaactggagagagttggcataaataagaatcttccaagtggataaactcctataaagaaatcgtgtagccagcagaggccaggatgttgtgttgggtgactgtggacaaaaagagtcaaacttcgtaaagtgtttgaagagatttatcctgagtcaaatatgagtggccaatggtgcgtgacaaagccctcaggagatcctgaggacagtgcccaaggtgatcaggattacaacttagttttatacattttagggagacatgagacatcaatcaaatacatgtaagatgtacatccaggtcataggtagattcaaagattttctaattggcaattggtttaaagagttaaataaacgcctaaggacctggaaacaatagtggggaatgtctgggttaagataaggggttgtggcgaccagggttccgattatgcagaggaagtctccaggttgcaggcacagagagaatagatcataaatgttcttatcagagttgatcctctcctggatcaggaaaaagtaaggaaaaggaagaggattctcttcagaaggtaatttaccccatgagtcagctttgcaggcctatttcaagatacggcaaataaaacatattgggggttaaatattttgatttccttctttacctgtcatgtgatgctatgccagagtcaggttggaaagcagcccccactatatagtgttcaatgaaacccctctgatgagggtttgtagggtggactccccagtcccttagataagaatttgggcaagagaagaaaaagatcagccattggtccttagtgacaaccatagctagtggccacagggaggttctcgggcgggaggagacattgatctttcccagtgctctgccccccatctggctgtttgctctataaagcaaaagggagagcaaagaggaaagggaggttttaagtgaggcaggtgactgtgggattcagggtcttctttacagttttctcctattctgtacaggggaaggttactgctgataagacacagctgagagagggacgagctcccgggacctaaagtgaccagaaatacagctcctgagtcttgaggcacagctgcggcgtggtttacttagggtttgttctagcaaggacattaactgtcctccagtgtttattctgaagaaatgtttggttggccttcctcatctcactgcctgaccttgcagtatagaaaaatactgatcatcttggctcttaaacaggtggaactaaatgcctagctcaacacaggtaacacagtcagggaaagttggtgtttagggttggatgcctcctgtttcatctgaaagtcaaatcaaggtcaagaagtttccatttggtgtagctccctcctccctccttttcatctcccagctgcagaatagggttatttggcctgcacagattgtatgattccgtagtgacacgtgtggcctccggggtacataaagactggccttggagtgaaataatctcagcacttcgcacaaggcactggaaggaactggggtttcagagggatgcttgttctgttggcattgtgtggcccggacttctcacagggtgaggctggggctcacccaccccatcatccccacactcaccctgctgggctctgtccacttgactgccattgacccgaggtgggagtgcaggaggagtgtggttattacatcacggaccctcggggcgcagactcggctgttttctcttcttcttaacaagcaattcagagttcatggaaagggcattgcggcttccctgggggaactgttttcaaattccatttctcacgcttaaaacaaaaatcaaagttcaaagagatcttggatcagagagatttgccttgaggtcagggagaatacctaatctgagttgtgttttagagtcatactttctttctgttttttttaatgatgtccagggacaaaacaaagagtagtaatcatgtttatccaaatgctggcttagccttagtgaactctcaccttcttcagttctgcctctcccgggacctaaagccagtgggcccctcctccaccctggcatcctcgcctcctggtcctgcttatggaggggactgttcctggtggcggcttactccttccctttcacgtgttgttcttgcaggggcagtttagcccccacaatgtgcctgggtacacaggtgaagtgctaatgtgctactgtgtgtccaacggtgtgattcctccccagaaacctttagggctataatgagattcttttagaacctgccttgccatttttttagacagagtcttgctctgttgcccaggctctagtgcggtggcgtgatctcggctcactgcaacctctgcctcctgggttcaagtgattctctgcctcagcctctcgagtagctgggcttacagggatccacaaccacgcctggctaatttttgtattttcagtagagatggggtttcaccatgttagccaggctggtcttgaactcttgacttcaggtgatccgccctcttcggcctcccaaagtgctgggattacaggtgtgaaccactgcacctggcctaccttgccatttgactttacaaggcagaaggaaagggaggagctgcagtttttggggctacccagtgtatatgttggcagaccacctggttcacccacagggatcccacaacaccagaaggtagtaggacatgttgcagtgtcactgatggggtgggcacaaactaggagaagccacggtatgtggtctgccagggtgtcttcttgctataaactctgaatgacatcagaagggaaaagagtacgaaattcagagtgaaaggcctgagtttgggtcccagccccactgctgtgaatgcaaatcctgggatgttgccagctggcagagttggttttttatggaggctctgagggaaggtcttccatgcctcttccttagcttctgatgttgctccaatccttgccattccttggcttgtagatgcatcactccagtctctgcatccgtcctcacatgatgttcttctctgcaggcctctgtgtctcaaatctcactctgcatttctcttatagggacacctgtgagtggatttagggcccattctaaacccaggttgatttcatcttgagatccttacctaattacatctgcaaagaccctattttcaaaggttccattctgaggatccggtggacatgtgttttgaggaatactattcaacccaatacagctgtagagttagggggtagagtggaaaggagggcatggcagtggcttccaccggaagcacctgatctgccagggagagctggtgttcggattcaaaagacacagtctgagtcactggatggacaacctgggggttaccactggtaaatacagaaaggttacagcacacagttgatttatggagatccattcatttaacaacttgaaaaattggctaccttccaggttctgggtctggtaatgaagtcatagaaggcccccaaaatgcaagagtcctgaagggctcccaggctcgcttcaactgcaccgtctcccagggctggaagctcatcatgtgggctctcagtgacatggtggtgctaagcgtcaggcccatggagcccatcatcaccaatgaccgcttcacctctcagaggtacgaccagggcgggaacttcacctcggagatgatcatccacaatgtggagcccagtgattcggggaacatcagatgcagcctccagaacagtcgcctgcatggatctgcttaccttaccgtccaaggtgtgtatgcaggtggcttctgaagtccatcaggttaaatgtcagagggcaggaaggaccttctaaagttcatgccgcgtatgatggcagacgtggtctaccttcagttggtgttgacctacaattattctgaactgatgaatgttttgcgatttatttgtcgcctccttcctccctcatgctctccctacctcctcacttcttcttcccttctccccctctcttccttcctgtgtgctctagccttcagttggcaataggcttagaattattctggatggactaatgtttattgtttcgttgatttatcccccttcttcctcacttcctcccatctttccctttttcctgcttcattctctttctccttccatctttgctttccttttttctggttaagactgatagagacagattttatcacttcccctttgaatccattttagtatttaacagcctttctggaaacgtatcctggaattcttctagggccagttgcagtcatttttctttgatttagagacagttgtcaatcactgccctttctctagtttttccatatacatgactatatttctctgcttgcatcatttatcaactctgaagcatgctttaactctttcctctttccagcagaatccccccaacttatttctctaccctgcctccaactacagtgggatagtcattatagtcaaagttgtgtgttcaccaaatatatcaagtcattgagagaaaagaaaagaataaacaaaatttataataatagcttatttttcattttagaggtaatttggaggtgctgaagataatgttacacagtaaaaaagtaaaaggatgctttacaaagatttggaatagtcttaccaaaatttaatcactttgcattctttaaaagtgtatttatactctatttaaagatatagagtgcctgatttccatggcagcatttcttataagagaatatattatatcttataaattatttcttatctctatatatttacttgtctggaagaaattcccaaagattttgttcatatttatgttgctattaaatcagatttgatagcctttggtggagacatgtctacctatttctatttgtgttttaaaaaatgttttttattttagaaatttagctaaattggtgtgtcttacttttgtgtgtttttaattttgtgtagtttaattaggggcacaattctattttctaaataagtgattttataaggctatttaggactgttggcctatgttgcataaccagattcttattatgataatttgtgatataagagaaagaacagaggaaaaaagaatcaaagatataaattctggttttggcttcatcagttatctatcagagagacccctgagatggctcaatttcttcatctttaacctggagatgaatcttcccggcccacctcatgggtttgttgtgtggatcaggtgaaaaaatggctaaagatggtttgatgactccaaagtcctgtctgattcaattccctgcacattaagttgggagccagagtggtctagtggtcaggagtgcagacttggggcttggctgcctgggtccatgttactgctttatgacaatgtgtgacctgggacacaattacttaatgactttgagtcctagtgtcctcatcatagggctgccgtggtgtcaaatgagtaggtctatgtaaagcctttaccacacctggctcatagcaatcactgtatggccatttgctattatttattgtgctcccaataaaagcatgccattgtgttggttatttaagagtgactcaaagaggaatagaataagacacagtttctttctttagaacctcacaagaagagtggataatgcaagttgcacaaataatagggatgccagccacccagatgctggcaagtgagatggaagggaggcaagctcaggttccagtcgggaggggagctgacagagtcaataaagccttcatggatgatttcatggagaaggtgccattggagatgtgccttccaggtctgtagatggtagacagaatgggaaagcaagagaggaggagggcatccctggagcagggaaacacaggatcacaggcatggcttattactgctgtacttatgacacatcacattcagaaaccatgtggttttgtagcatcttttcccaaagtcacaagtctacaaatttgtctgaatcccgctgactttttatatattggtaattatggtagtttttggttttaatacagatgaaagagcaagcatctagagaaggcaaagacttctccaagatattgcgagaggaacccatagagcttggcctgaacttcatccctttatcctcatctcattgctctgaatggcacttagttcctagaggagcaaatgttctctgagcaacagggtctccctcaagggagaaagaatcttgaaaaaagaggaaacaaccatgaattattctatgattttttcacctccttatatgtcaacaaaatagagatgacataactccaaattgagtcatctgaaatccatgtgaatattctagtatcacttttgtataaagggtttgtcatgctactggctaacctttgtgaaagccagtgggggaaagtggaatcccaagtgtatacagaaaaaggaaatccttcagatcgctgagttggtccacttgctgccttatccaccaatcaatcacacaccaaactctagacctcttatgttttgagggctgcaaggacttgagttcaagagcttctgttattaactgagacaatatcattcctcccagttctgtcatcttaaaccgtctctctgtcaaacaaaacaaacacaaaaccctttagactcaagggacaaaccctttctccactccttgttgcatttacagtagcccttgaattagcaaaagtgcctttcttattccaagggaatattcaggaaggaataattgggaagctaacatttcagagcaaaaagatctttcagagccgacccagttcactgtagtctagggactccttgatgtaccctgagatcctttcagggtggtctatgaagtcatgattgttttcataataatatgaagattcctattattgttgcctttttcacccttcttctcacaagtgcacaggagagctttccactatacattgggaaggtctgcatgcctcagaattttccagatgactgaagtgtaacaaaatcatgcaaggataaaaggtccattcaaagtgccagatagtgcaatgggtttcaacataacagaaaatgaaagttccttgatagagtttcagattccactgtgtaacaaacatttaagaaacctcagccgggaatggtggctcatgcctgtaatcccagcattttgggaggcccaggcgggcagctcacttgagcccaggagtttgagaccagcctgggcagcatggtgaaattccatctcttaaaaaaagtgctgggcgcggtggcttatgcctgtaatcccagctactcgggaggctgaggcaggagaatagcttgaacttgggaggcggaggttgccgtgagccaacatggcaccattgcactccagcctgggcaacaagagtgaaagtctgtctcaaaaaaaaaaaaaaaaaaaaaaaagagaaaagtaagttttggtacagtattcaagaatatccacaattatctgaaaaagctattaaatactcctcactgttccaactacatatctgtatgaagtcaggttttctttacatccttcaaacaaagcagtatattgcaacagactgaatgaagagacagctatgagaatccagccagacattacagagatttatataagtataaaacaatgtcactcatcttattaatttttttagtttaaaaatgtgattcgtttccatgaaaatatgttaatcaaaattaacatgtaataaattattattttaaaatatatgtttaaaataattgtttaactttaatttcaaatatgataaatattggtagataaaacccacacaaatgaaaggtctttggagtcctcaatgcttttgaagagtgtaaaaggtactgagaccaaagtgtttgagaagtgctgatctggtcaaactatctcattcagtaagtacaacaaagagagccaaaaaaattcagtgacttgcccaaagtgatgacaattttctggcagaaccaagattgggaacaaattttttcatttcttagttcagtattctttccattatgttgtgtagtccagagtttcagcatgtttttcttggacatatatgtatacacatttcactaaggctgtgtctttactggggccaatcctcaggttgttttagtcacacttgtgaaaacaagtactattttcatatgggttgtttgcagtatgaatgctgacctatgcgagagtgttcttaataaaaaaataacttatctaagttattctggcacatgatttgggttagttatttctgtaaatattagattggaattcgatttaatttgtaatgagaaacctatgttaaggcaataccctaggaagttatgtttaagaccatatgaccctagaaataaataaaaatgtatctgattgaccaaaactccaggggagacttgcgtctgaccctgggctgtgtcctcgtcacagtgagaagaaggtgaagctcgtttctctttttccctttgctccctcgacagcccaagataattctgtagctcacttcagggattgtataacccccctatggcatgcacttttctttcccacataattatttccccctggtttctgacttttatgaagcattttctatgtaactttgctttcttgtgagcaacctcaccttcttcagagactctggcaggtgtacaaaaaagacccagataaaatctgagttaagatttcctagtagagacacagcctctttgggcttgggaaaataggtctcacaaaatgtaatttgaagcaaaacttaaaaaaaaaaagaaaaaaaaaaagaaaacttagaagcgagaggcatggtcatgtcttcaatgtgtttctctcttttcttctttagttatgggagagctgttcattcccagtgttaatcttgtagtcgctgagaatgaaccttgtgaagttacttgtctaccctcacactggacccggctcccggatatttcctgggagctcggtctcctggtcagccattcaagctattattttgttccggagcccagcgaccttcaaagtgcagtgagcatcctggctctgaccccacagagcaatgggactttgacttgcgtggctacctggaagagcctgaaggcccgcaagtctgcaactgtaaatctcactgtgattcggtgtccccaaggtaagtgaagacattctgctttatatgaaatgaatgattatttcatgcttcaatattacgtagaatgctccttcatccacgatgcctggaaaaatcatatggcgaccttgattttgggtggggatgataaggccaatcacatctgctgtcagcttaataatcttataccctcgtctgctttttaaattccatcttaaagttttttttctcctattacatttgaaaaccatttagaatcttgccaattatttatcatcaaagagcatcaagtttggagacaaatgcttgaattaaacatttgtgtttctagcttttacctaccactgtttcagtttgatcccaccccctgagccagtatgaagcaggtcttcatactggaggagggtgttcaggtctccctggatttcttccaatcttagtggaattataatgcttcattttcttccccaccaaatctacaatgtgtttgaaagtgtcaagtctatatgtatatagtttaacttgactaaatgacagaactttaaagtttagatccccctaaagaatctcctgtggggtttttggtgtaccagacactctaaccacattccttgaaggggcccatagcgcctgtgagctttgagtcagcctggacagggtgggcccgggatgctggagattgactttaacttaacattttacaaaaaaggaagtgaggcccggagaaagtctgtgctttcatccgggtcacacagccaaagtggcagagctgggcctagaagctgagaagagcttttcttttcgtgtctaaagcttttcccaccatgaaaacacctttacctgagatcttccaaagttcagaacaaagccatagccaaagccaaataatgatggtaacgataataaacagcaccctatagctcttaccaagttatcaggcactattctgagcacttctcaggtattcacagaattaaccggccctacagccgtatgagtgttgctgttattcctattgtaaaggcaaggtgaccgggacagtgctgttgggattgtgcacacgtctgtagagtgagtaaatgacagggcaacctgtactcacctgtagagtgagtaaatgacaggcagtctgtctccagaaactgctcacctggcaactctgcccaccgtgtgagcagccacttggagggtataagaggtcccatggctgccgtaacggaggaccacaggcttggtggcttaaacaacagaaatggattttctcacagtcctggaggttggaagtgtcatcagggctggttcctcctgagggctgggagggagcctctgttccttacctctccccttgttccttgtggttgctggccatcttccttagcttgtagaaacatcaccctcctctctgccttcatctttacttggtgttgtcccattttttatggtcttttctgagataaacacttttgaacggtacaggttatttttgcaagatgcctctcaatttgggtcagtttggatcaatttggatcaatttggatttgtctaaaatttttcatcatactttgacttaggttacatatttttggcaagatataggtaatgtaatgtggtcacaggatgacaattttcattggcgtaagtttgaccgtttggtgaaggtggcataccctgaatttatccaacataaaagtaccttttttgactttataattaatatgtagccaatagatattgtgggaatatcctgtttacccacaacctttcacctaatacaattttttaaaaaaacttttattttaggttcagggttacacatactggtttgttgtataggcaaactcatgtcacaggggattgttgtacaaattattttatgacctatgtactaagcctagtacccattagttatttttcctgcttctctccctcctcccaccctccaccctcagatagaccccagtgtgtgttgttcccctctatgtatccttgtgttctcatcattcagctcccacttataagtgagaacatgcggtatttggttttctgttcctacattagtttgctaaggataatgacctccagctccatccacgtccttgcaaaggagatgattttgttctttttttacctactaacttttacattcattgataaatcattgcctgaatcaattacttctatggtgattgtaaagagtgatttcctgcttccattattctttccatatctcttaattggctttcttttgttaaacaaaagacttccctcccctttcttccttttctttttttttcctcacagttttagtagggactcaattttgtccaatacattctaatctattcctgtcatttttcgttttgacacccagattgctccagacttggtcagttggtgtccctccaagctggtgctggtgtccttccgacatccccctattagtttttgagcacctggaccagtaaggtgttccagtctcactttgcacttccctgtctccacctggaatcagtcatttctccagagaaccaaccttaaatatcataagttagtctacttaaatatgataaagtatggtccaaactttgaaagagaagattttaaaaaaatccattagcaccaaatggaataaaatggactggttaaagcatatatcttaacgaggtaacgatgcagcaggagctctggcctgattgatggtaccttagagagatagattttagagactggcttgcttgcaaatgttttcttttgtagtggaagggaaagagagcacttaatttcccttggtcaggttaaattcactgaattcttcttagtccagaactagtgccttaacgatggtagctggaggcatggctgctggagagggaggctcagtgggtgcttgcaatgagtctagctttattggattcatttggaacagggtaatttgtttctaaattattcatcaagatccagtgcagctggtggctggctgcatgttgtgtgttttaggtaagttttattagctgaagacctcattgcagccttggttggcggagctggtgaccagacgaggctgtaaggagaacagccaggtttccagagagccaagtgttaatggggctgtgcccattcaggcttcttcaggaatcatataaacatccatttttccacccatttcctaaaagtgcaaagcatttgttttcatttctgaaatgatccctgcaagtcgttgaaacaggaatgacgtcagctttggaagcttatccagtcagggcaagtcacagggttgtatgaagtacttcctggtttatagttcaaaaggtttctttagagaaaaacatactgggagggctgacattcatttcagatctgttttttagaaattgattttcttaactacagaaatgatacaaacctcgagcattgcagacgtatccaaaactggagagtgaggccgtctcaccctgtcttgggagaagcactgtcagagccatctgcccctcggggtggttttctttgtgcacttatttgtgtgtaggttgtgaaatggttaaaatgaagtaatgtttttaggacacatgagcaccttgtggaatgtagtgattcctggttataaccttactgttttgagaaatggcaattttgggtgcagagaagagtagtagaagtgacagtcctaggcctttgccctggcactgatggtgcaactttgggcaagtcagcaaacttcagggctcagttttctcacctgtaaagtgggtaggagaagaatagagaagtcctctctcccggctgtggatcagagacagcagaggagccttctttataaatatgctgaggctcagcctcctcctgggggttttgtttcattggtttttgtggagcctgggaattgcaattgtaaaaaaagttcccaagttactctaatgggcagccaggattgggggctactgaactgaaaaaaaaaatctctaaggcctagccttcccctccagcccgatcaagtgctatgtctacacagacttggacattagacagcctgggttccaatcccagctcacacaatcactagccgtgtgtcttctgggcaaattacttaccctctctgagcctcagttttagaacggtccttgctccagagcacataggactggaaagggagtgattgtcattcacactattgattcggagatctcttgtgtcgcctctagtgggcacagggatatgctttgcacatgatagtggtgacatttggtattaatatgtacttggcacgtgttggtggtgacattttatattaatccatttggttttaagaaattctatacctttttaaaactctatgcattcctttgagagcatctgggaaatgctattttccttttcttcacagatgggaaaaggacaatctccaagtggaggttaaagcacatggtaaagtcagtaatgaggccctaacaagcacacagtggtgtgaaggagtgcagggagaaaggcaagcagtgttgaccttggagctaatcttccttagtcactatgtgtgggttactcaggtatagtatactcatcctctccagcaaacctgccattcacctgagccagacacacccacaccctccatagggtacaaggcacagaccagcaccccactgtagactttatgcaaatacatttatgtcatacctgggccatattttcctcagaaggattattctacattggagacaacacatggcaggatggaaagatatgagccagtggccctgtggcttcctgttctgggctccctgtgccatttacttagtcactctgtcctgagcgtcttgtctgcatgatgaaaagattggattatggatgacatcattccaagagtctgtgttttctgtccactgtcagatttttggtttgtcaataatatatggctatgatctatttttcagtatacagtaaatgcactctttttaaaaaaattagctccatactaaacaaaaatatacatgcatgtgtgtatacctatgtgtatagatataaaatatatattatatatgataaattttaaatggttatgaaaataagaaaggtctatctttgtagccccagcactaaatcatgcctcttgctgactcgtacactacactttgagctccagtggattaaagggagacttcagcttaagtctcacccaggcataaaacttggaacatttgccttccaatggagcatggtcacaacaaataggaagtgaaagaataagtgatgtggttcctaataccagttccatttttgtcagagtttgggtcttttaactgaatgcaggcatcactttctgaactttgtggttaaattaagggacaaaagagtgtttaaagtccctctggccctcagtctctcccttgactcagtcaccattcccagcaaagtgtcccttcccttctgttaaacatgcattctctgaaaataaggcaggccctctctgtcctagattaaggcaggctctctctgggctagattagaggaaatgttatgtccagattcaggaagtttggcacactcgtatttctgtctagtaggggaaggaaagtactgatagagagtgtgtgagtaagttaacaagcatcctgtcttatgccagtgagaatttcaagcctgtctcttaaatcttgagccagacctcattggttaaccccagccagctcccttattaagaaaacttgttatatatgcaaacttcagttcgtaagagtccgttaaactggaaataggatgaccactgccatcttgagcctgtgcactgtagcttacagcattctcagaactttcacacacacccctgaacagcctggtgggacaggagttgttattggtaagtgagccagaagccaaagttaatgcagcaagaaatgctggtcatgagatttcactggttccatccacaggaaacctaaagttctcgctcagtcacaaagctcccacacagtggtccaaccttcaactcaagactgtgaagatcatggatccaactctggacttcaccattttattatcacatctgtgggagggggagtgtgagagcatcctgtcatgtcgtgggtagcttgggcagtgtttacattgtggctgcgtacaagggattcccaaaatgtgggtcaccaactatctgcatcagaatcacttggggtatcattcgggatatcctgactctgtgatcctggaggcgggctttgaatctgcatgtgcaatgatattccaggtgacgcttgggattctgctgtctgtggagcaaggggataaatgtgctctctgcatgtgaagggtctgccttgtgttagtgcttcagctccggggctgggaaggtgtggaatgggaagggtgtaatctgttccttccatcttcaccatttttgggagagccttttacaagtctctatctattccagctcatctcggatggtgggagatgtggagatagacagcattaggaaagtagtttgacttccttataatcctacagttctgctctgggcatcttactatggggagaaaggtgatccctagacctggttcagctgcagctgactgcctggtgcatagacttctattctccatgcagagtcatttaacattgacacaggaatagcaaactactattgcaaggtcaattttccaggaaaattctaaggaagaacatctaagagctgtttttgaactccagtctgtggttccaaagtggtggatggccattgatttcaaagcaaaccccatgttccttcataggaagtctactgtttcagtattttctaaagactagtatctaacaaaatagcatgcatttacattaagataccacccaagcacgcagggttgagtgacagccttttgttgaataacaattcacaattaaacagatcaacttaaatgtgtgtggtttgacttcagcgtggtgcgctagggagaagtgaagggctggatgaaaactctcttgggaacatcaatgtagttcccatactgtccctttctgtgacgataaaaacgttctacatctgtggtgactgagcacttgaaatgtggctagtgcaactgaggcactgaatatttaatgactcatacttttaattaacttaaatttgaatttggatgatcatgtgaagccacaacagctctgcttaagacatggtggaaaagaatcaaaatggctttttcctctctccttctctccctacctccctcttgcttcctgattgctctgcctcaccttacccttttttcctcccacctccatgactactaggtaaaataagagtgcaacatacacactaaggaaggtgtctcctgaaaagctatggaaaaagcaattgctgtgtgaggaattaatttgaggatcggggagctggatgcggctagggtgcaagccatgcacctaagttcctttagaagtgactgtccctcagaatattctggtttcctctgggcgctggactctcaatgagtggggacatggaagggagaacaaaatgtctttattccagtcttgtccagcagtagtgctcaaaaagtatttcttgattaaataaaggatgtcaaacgtgaccatcactatgccaacctcaggggactgtcagcccagccctgccttatctacttctcagggatattagagacattaaacaagcaacacctgaactgggttactaagaagttgtttactggcagaaataagtattgtgatggaaggtactgtagagtattgaataattaaacacattgaaagaaacttggcctatgacgcctagccatagcaggctgaatagttataatattactagaaaacataatgcaacttataatggggcagaatctgtgattctaggcagtgcaagtatcactaaaatatatttttttcttctttagacactggaggtggtattaatattccaggtgtattatcaagtttaccgagtttaggtttttcattgcctacttggggcaaagttggacttggactagcaggcaccatgcttctgacgccgacgtgtactcttacaatacgctgctgctgctgccgccgtcgttgttgtggctgcaactgctgctgccgttgttgtttctgctgtagaagaaaaagaggtaatttttttgttcatttacatttgtacatacttctgaacttttggtacaagcagttgaagttaatgaactcatcagctctttcaaaagatagattaactacaatatcactttacctctattagaaactgtggttgcacactgttggtgggatgtaaattgttacagcctttatggaaacagtatggaggttcccccaaaaattaaaatagagctatcctataatccagcaatcccattcctgggtctatatccaaaagaaatgacatcttcatattgaagagatatctgcatttccacgttcattacatcactcttcacaatagcaaagatatggaatcaacctatgtacatcaatagatgaatggataaagaaaatgtggtatatagacacaatggaacactagacagccttcaaaaagaagaaaatcttgtcctttgctacaccctggagagacctaaaggatattatgctaagtgaaataagccagacacagaaaggcaaatattgtatgatctctattataggtggaatctaaaaaagccaagctcatggaaacaggaggtagaatggtgggtgttaccagggagtgggaatgggggttggggagatgttggtcgaagggtacaaagtttcaattagacaggaaagataaattctgtagatctactgtacagcatgatgactgtaattaattatcatgtattgtgtacttgaaaattgctaagagaacaggtcttagatattctcaccacaaaatagcgatgaatatgtgagatgatggttatatgaattagcttgatttaatcatttcacaatatgtacatagctcaaaatatcacagcgtacactgtaaatacacataatttttatttgtctgtgtgttttaataaagctcagacaataacaataaaataaaaaccacaatgaaagacacattggctttaagagtccttgaaagaaacggtggcaaattcttggagaagaaaaggactttcttaaggaaggaagctgtttctttggggcctgatgcaaccccttaggaagaccaagatcttcatgctcttgaaaaagtgattgaagcagtgcctttctcaccaaagacactgattattggatttttgtgcttatttgtaaggatatatagctattataatgtcatttagatgctatggttttttagaatcatatctacatatctgaacatattaaatggttgtttcctattctgaagaattttaaatctccctttgtaggtgaatgttaatagagtggtagaaagaaaaaataagatcttctgttaataaaaaatagtatcaatacaattaataaaaataattacgtgtttctttagaatgaaattctctgagatactcccacatcgtatgaaagcagtagccttgcttgcggttgggatcaatggtgaggtgggcacataaacactaggtgggcttgtcgtagcattaggcagtttgtggcttcagaagcctacggatgctttatcatgagaatgctccaggactttccatgtgctgaatgtgtgtttgtccttacctttcttccttttgttaaaaacttcatgtactcctgtttgaacattttgtacagttaaattatttttctaaagatcggagttttgatgttagcttgcatgtcagttgaactacattttaagttttattaacactaactgccactcaatgaacacttagtgtgtgtgtgccaggcactgtgctaactcttttacatggagtatctcactaaaatgcatggactagccttaactaaactaaaggtctagtcttagttcctcgatgaatttggtttgtgattgggcaattcactctgtagtataacttaaaaaaatttcagacacgtgaatattttcttatattctcttccttacatgaagggcagtacactatagatattcttttgcattttactttttttcccttacagtatatcctggaaatcaatccatgtcagttcattgagatttccttcctttcttattacagctatatggttatccattgtgtagatgtaccatggtttattcaaccattctccaatatataagcatttaggtcatttctggtattttgcaattacaagcaatgttgcaatgaataatgttgtgtatgttcatatttatggaggtgtagcttttgggtaaattctcagaagtaggattgctaggtcaaaagctacgtgtgtatgtagttttgtcacggattgccaaatttccctccagcaaggttgtacaatttgcatgcttaccagcaacacatgagagttcccgtttccccacagcctggccaacagggtgtcatcatactgtttagtttatgccaacctggaaagtaagtaaataagaaatggtatctcagcatagttttgattctatcttattataagtgaggttgaactactgttccatctttttgtatgattgagaacaatttttatatgtttttataacttgtcattctatatcttttgctcattattttctctctcagatttttgggctttttactccttctaattttaagaattcttttgatgttaggaccgatggccccctttatctgcgttttgagtcataggaagtatttccttatatggaagtttttttctggtgcttatatcttatatggtttcatttatttgtctttctaggttttattcattcttctgtgtgatatgttgtatgcatctaattttatcttcttccaaataactaagcagttgtcccggcagcattgactgaaatctctgtctttggcctggtggtttgagatgccacctttatcaaacactgatttccatatgcacttaggtctctttctgggctctctattctgttccattggtccgtttgcctattcatgcacttacactgtactgttttaattatagaagttttatagtatgttttaatgtctccttgggtgagtctgccttgtagctttccgttttagtgttcttctggctagttttgcatgtttattgttaaaacttgtttattttaaaaaattgtggcaaaatctacataaaattttccattttaaccatttttgagtgtacagttcagtagcattaaatacatttacacttttatgcaaccatcactaccatccatctacagatctaggttcatcttgcaaaataaacactgtacctatcaaacaataactccctattcccgcttccccccagtccctggcaaccacgattctactttctatcaatttgactactctaagtatcttatataagtggaatcatgcagtatttgtctttttaaaaatggcatacagagtgatattttgatatgtgtgtacaatgtataatgatcaaatcagggtaattagcttatccatcatctcaaacatttatcatttctttgtgtggtgaacatttaaaaatcttctcttccagacttttgaaaacacagcaccttatagttaaccatattcactttacagtgctgcagaacactgaaacttttcctcttatctagccgtaactttgtgttcattaaccaagctgtccctagcttcccccgactacctccccttcccagcctctgatccccacaattataatctctgcttcaatgtgctcaattttttttttagctcctagcatatgagtgagaacatgtggtatttatctttctgtgcctgacttatttcacttaacacaatgccctccaggctcatccatgtgctgtggatttcattctgttttacggtggaatagtattccattgcgtacacgtgccacattttctttatccactcatctattaatagatatttagattgatttcatatcttagctattgtgaatagtgctgcaataaatgtgggggtgcagatatctctttgacatactgatttcaattctttgagatacccagattgcctgattgtatgatagctctatttttagtttttttgaaaaaccttcatactgttttccataatgactgtactaatttacattcccaccaatagagtatgagagtttccatttctgttcattctcaccagcatttttattttttgtctttttgataatagccattctaagtagggtgagatgatatctcattgtggttttgatttgcatttccctgagaattagtgatgttgaatgttttttcatacatttgttgaccatttacatgtctaagaagacatctaaattgagaaatgtctgttcagaccattaactcattttaacattgcattgtttttttgctgtcgagatgtttgagttccttatatagtctggatattaatcccctgttggatgaatagtttgcaaatatttcctcccattctgtaggttataattttgctgttgattgtttcttttgctgtgcagaagcttttcagtttaatatagtcccatttgtctatttttatttttgttgcctgtgattttgaagacttagccataaaatctttgtctaggccaatgtcctgaaggatttatcctatgttttcttctagtagttttatggtttggtgtcttatatttaattctttaagtttgagtttattttgtgtccactttgagtttattttgtatatggtaagagataggggcctaatttcattcttttgtatatggatatccagttttctcagcaccgtgtattgaagaggcagcctttccccagtgtatgttcttggcacctttgccaaaaatcagttagctgtaaatacgtggatttatttctgggttctcagtattgttccatctgtgatatacctttattctctgggaagcagaaattgaaaggcagtaaactcctgttggacctaaattagaagggaaattgtttttacctgggaattattccatatgccccagatgggttactcaaatggaagacactggattttaaaggaaaaccactaaatgacttagattttaatagagatgtgactacagattgttcagtaccttcagaacattatttctaacatgagctatgtggagtagttggagaaattctggttatttgtacatcctggttcccttcagcttttgtctgttctatactcatctcataagaagattaaccgatggttgttggcccacacaggatatgcagaaggtgatttttagtttcttcatctacagaatgggaataaatactatcctatagattggtagtaataattaaataagtatattaaaagtttctgtgatccatcctagatttaatcttttctttaactttgagatgaaaagcctttataagagtgaactgtcaccccacccctgcccaccccattcacagtaagtccagataaggctacaaacaggtctgccacagcctacttacaatgcccaccttgccccaccaggtgtgattcatagtggaaattatgctatacctttacataagtgtgaaagatgagtaaaggtctggatttctctatgatgattatttcaatgcttaaaaaacattaaacatcaaaaattttcagaaagtattttctggttctctgctgctatccagagatttctcagtaagccgacggattaactgaccacataggaatggctgagcttctgctcagcctggcctgggggctttgggatggcagcattctagagggtccccaggctcctttctttttttttttttcctttaacttataagattatttatttagctatcagaaatacaacattgttcccttttcttttttttaaattatactttaagttttagggtacatgtgcacaatgtgcaggtttgttacatatatatatacatgtgccatgttggtgtgctgcacccattaactcgtcatttaatgttaggtatatctcctaatgctatctctcccccctcccccaaccccacaaaaccctagaagaaaacctaggcaataccattcaggacataggcatgggcaaggactttatgtctaaaacaccaaaaacaatggcagcaccatttattaaatagggaatcctttccccattgcttgtttttgtcaggtttgtcaaagatcagatagttgtagatatgcggtgttatttctgagggctctgttctgttccattgacctatatctctgttttggtaccagtaccatgctgttttggttactgtagccttgtagtatagtttgaagtcaggtagtgtgatgcctccacctttgttcttttggcttaggattgatttggcgatgtgggctcttttttggttccatatgaactttaaagtagttttttccaattcagtgaagaaagtcattggtagcttgatggggatggcattgaatctgtaaattaccttgggcagtatggccattttcatgatattgattcttcctacccatgagcatggaatgttcttccatttgtttgtatcctcttttatttccttgagcagtggtttgtagttctccttgaagaggtccttcacatcccttgtaagctggattcctaggtattttattctctttgaagcaattgtgaatgggagttcactcatgatttggctctctgtttgtctgttgttggtgtataagaatgcttggaaaactggctagccatatatagaaagctgaaactggatcccttccttacaccttacacaaaaatcaattcaagatggattaaagacttaaacgttagacctaaaaccataaaaaccctagaagaaaacctaggcattaccattcagaacataggcatgggcaaggacttcatgtctaaaacaccaaaagcaatggcaacaaaagccaaaattgacaaatgggatctaattaaactaaagagcttctgcacagcaaaagaaactaccatcagagtgaacaggcaacctacaaaatgggagaaaatttttgcaacctgctcatctgacaaagggctaatatccagaatctacaatgaactcaaacaaatttacaagaaaaaaacaaacaaccctatcaaaaagtgggcaaaggacatgaacagacacttctcaaaagaagacatttatgcagccaaaaaacacatgaaaaaatgctcaccatcactggccatcagagaaatgcaaatcaaaaccacaatgagataccatctcacaccagttagaatggcaatcattaaaaagtcaggaaacaacaggtgctggagaggatgtggagaaataggaacacttttacactgttggtgggactgtaaactagttcaaccattgtggaagtcggtgtggcgattcctcagggatctagaactagaaataccatttgacccagccatcccattactgggtatatacccaaaggactataaatcatgctgctataaagacacatgcacacgtatgtttattgtggcattattcacaatagcaaagacttggaaccaacccacatgtccaacaacgatagactggattaagaaaatgtggcacatattcaccatggaatactatgcagccataaaaaatggtgagttcatgtcctttgtagggacatggatgaaattggaaatcatcattctcagtaaactatcgcaagaacaaaaaaccaaacactgtgtattctcactcataggtgggaactgaacaatgagaacacatggatacagaaaggggaacatcatactctggggactgttgtggggtagggggaagggggagggatagcactgggagatatacctattgctagatggtgagttagtgggtgtagcgcaccagcatgtcacatgtatacatatgtaactaacctgcacattgtgcacatgtacccgaaaacttaaagtattaaaaaaaaaatgcaatggcaacaaaagccaaaattgacaaatgggatctaattaagatcctttcttacaaactgtgcttacgctggtggcgttggaggcattcccctgttgctggagggcattcatctcttacctgatagtctcttttctgcaatccagatagaattgttttagtttgggatgtaaattggcaggtgttattagaattgaaaatacctgagaacgttatctaaaaactaaggaaaatgagtatttaaaaaatcttaatcaagcttgatatatagaaggcctggacagtaaagctcggttgtaaagatcacaggcttttgggacaaaaggttggggacttgatctgtggctttttactccccaccttcaaatcctagattccttttaatcagtctatggatccactgactaaaaacattagcaatttaatgacagtgtttttttttttttttttttggtggggtgggggcacaactgtatcaattgataccattggtacatattgattgaaaatgtatctttgaattaaagaaatatggtaatattaatataatagtgtctagtctgttaaaaatataataacagtaacacctacttttgagttattataacagttaaatgagctagtactttgcacagagcccgtttggtgctggcacatggtaaaaattgaatgaaaagcagcagtgattgataacacagaacatctcttcttggtattatggagtctgtatagtctcactcatcaaattcaatagtcacaaagtaataagtaaatacccctgggtgactgaaatatagtaagtactatacagtctgtatttcaggtacctaggaattatttatttttctaatagttaacagtgaattctactttcctatgctgggaagtcatttgataatttggtatgggaaaacttaataatgctccttgggtcacaaatactaatgttgggtctgttaaaataagggagtgtataaaaattaatgagactcgatttttagaataagtatcccgatttttccaatgtaattttgttcttttttgcaggatttcgtattcaatttcaaaagtaagtttgaaaccacatctattttctgaaaacaaaacaaaaaaaattgaacaacaacaataataacaacaatacgtacacacaactgcgggatttttggatttatgttatccagaattaagtaccagaggtagacaatgctgaaaaacacgtatgccgatcacaaactcatagggcaacatgaactgtgggatgaaacagatgggttgccactgcctacctttgacttgctctggttcccttagggaaatggagattttcttagtgtctggcatttgcagctctttccacaagaggacactgtgcaccatgactatcatcccgcctgctgtgggcggaggccagggccaccggcagaggtcctgctggaatttctgggatagtggagagcagtgagccaagccggatgcctgcaagtcacgtgaaactgtccaggcagacaaattaggcagtgttcggtgctcattcagccgtggggagcggacaggacggaaaaattcctttcattcccaggctgcccagaagtagctgcaagcacttttaaggtaactgtgtcaaggacttacaataagtagccagtaacccttttaaatgtctgcaatgttaacatagccatatgtgcaccaaggggagggttttttagacagacgttgtttgttgtgggtaatataacaacacatgtagttatcagtattttattagaatatttacatttttaagtgctgagattctaaaataccttttggctacattctgtgaatgaatatggacaatcaccatgtggcaaaggttatcccttctccctctgacccctggcaattgtgaagtttggagagaggacaccaccaagcagcagtctgaaaatatttctcctttgaggcctgacttagggcaagggaagaggaagaaaaatagaccctgataattattctggcatttctcttgattgctactaccagcggaatggaagcctggactctcggttcaccattgttgactgtgccaacatcttccatttctgttctctggggtcttaggtgatttgaaagcacagtaaagtgatcaatagctactcaggataatgggtagaggataacaacaactatagaatatgacactgggagcatgagaaaagctagtatatcttgagtgcctgatgtacatgccaggtactcactgttgcatgctttgtagaattttttgtctgaatgtgaactggacgggcccacctcagggcttgggcacctttgtctccgtgcagcccttgaacttaggtgagactgcattaagctccagagggataatgggggttgcccactgaataatccaaccccacttgctttcccctttcacgatgtccatggtgctcactccagctgcttgaggacttcttttgcattaaaataattaaaattatatgtatatagttgtatgtttattatggaaaaaaatcaatgcatgtttatttttagaaaaaataaatataaagataggcacaagaaatagtttaaaaaaatcacccacacttctatagttccaaagtaattattgttaactaactatgtatgtacctatgtactcaaatgttcatgtatatacccatagatatgcacacaaagcattttgtgaaatttggattatagtaaccattaattcatagcttgctcttttcactttgcacattctgaagattatttctgttaacaaatacttgcccacagcatttttgtagtatttgtttgctagttttagatagatacttttaagtacagaaaagtgcacacgttacaggtgtgtagcttgatcaggtttcacaaaaagcacaaatgcctgggcttgatggcagaaattcacagctagaacatcctcagcatccccaaagccccctagaccccggtcaaattgctgcctacccctcctccccaaaggtgacattcttctgacatctttcccacatccccagagattaggtgcatgcatcaatggcgtcattttgtgtatactcatttatgtctgccttcttgagcctctcactgtgagactgatccataccgtggcacgtgagtgtcagtggctcattattatgtaatattacattctgggcacatatgcaatttatttttaccttttgctttaaatgggtgtttgaatagttttcaggttgggaccattacaaacactactgctctggccaggcgtggtggctcactcctgtagtcccagcgctttgggaggccaaagcagtggatcccttgagcccaggagtttgagaccagcatggacaacatggaaaaaccccatctccacaaaaagtacaaaattagctgggcatgttggtgctttcctgtagtcccagatactcaggaggctgacttgggaggatcctttgagcccaggaggcagaagttacagtgagccgagatcacaccactgcactccaacctgggtgacagagtgagaccttgtcaccaagaaacaacaacaacaacgtcaaaaaacaactactctgagtactattgtaggagtcttttggtgaacataagtactcatttctgtttggttctgtggggaaatacagctgattctctttatctgcaggttccacatcctctgattcaaccaacaatggatcaaaaatatttgaaaaaatatacaacagtaaaaagtaatacaaaataaagaagcagtacagtataacaactatttgcatagcatttacattgtattaggtattataaataatctgggcataatttaaaatatatgggaggatgtgtgtatgttatatgcatatgcaaatcctacaccattttatatcagagacttgagcatttgcaaattttggtatctgcaggggtcctggaatcaatctctaacaaataccaagggagactgtatctagtcctaaaagctgggccagaaggtagcgtatcttcagctttagacagtgccacatttttccaaagaaggtgtacaggcttacactcccgctagcagtgtgtgagagctctcatatgtaataattttgacagatgccatggaattccattttagagaaccatcatcatttattttactagtcctccctgattgggcactcggttgtttgcagtttgcttttataaatagctcatgaatcaacattctttcaagtacatatttatacatatccttgattgtttccctagcatacatccttagaggtcaagtgtgactatttaaaattctttggcgttccattgccagacttccttccagcctccaaaccctaggaggctgcaccaacttttgctttatttcaggagttggcacattttttccataaaaggccctgtagtaaatagttttagttttgccagccatatggtctctgtcatgaggactcaactctgctgttataacatgagtatggctacatgtttaggtagccatagacaatatgtgagctgatagatgtaaccgtgttccaatgaaactttatttacaaaaacaaggagtgggtcagatttggcctgtgggtcatagcttgctgactcttgttttatttggtgaatggtttctgagagttgagtaacaactggggagtagagtccatggaccaggataaactttcatctctccccataatgggaatgtgtgagtaggcaggcgtgcatacctgcaacgcagcggcaaagctatggacttcctgtgttaagttcaatgtgtaagcatactcttgagagtaaccacgtgaactacgtaggtatccattgccaattaacatttggcaatgttaatgccaacaattaacatgaacataaaatggtctaattgtaggaaatctgaaaaagagaagacaaacaaagaaactgagacagaaagtggaaatgaaaactccggctacaattcagatgaacaaaagaccacaggtgagtagacaagaggggtggtgaaaagacctgggaaagagagagctggaagaagggctggcttgctagataccagctgcacagggaggctaacttggcaatggtggttattattttttggataaattttagaagaagaaattctagaacttggaatactctaggagtaggttaacagtaaaaatccacctatttgtctaatgcttaaaataaagtgaggaagaaccctgagagctttaaaaaactttgtttttttccatcacacactggggcctgccatagggtggggggaagggggaaggatagcattaggagatatacctaatgtaaatgacaagttaacgggtgcagcacaccaacaaggcacatgtatacatatgtaacaaacatgcacgttgtgcacatgtaccctagaacttaaagtataataaaaaaaattgttttttccccatgctttcttttttgtttaaagccctctacattaaaacatgtggggaggtattttaatacattgggggtaacttcctcccaatttcaagtagagtcaagtaagagatctcttccccttgaatgtaacagggagttgggaatgctggaaaactagacctacttttggagagtcttgctgtagtatctcattttcttgctatgagacaatacagagtgataatgcagtgagggcatctctaagacaacatcaccaggaagcagcagcagttgagtattgaaggccgatgagaggggaaggctgaacccactcctcctctgcaggatgaacaggacacctgccctcacaggctgctgggaacaccaaattccatgggaaggttttcagccaatcagtccttgctgaggggcctaaacacctgcgttttccacaaaaattggagctctattttcagcagccccattttttttgattttaccatggctgcctcccatgtgtattccagattgcatctttcagattgaaaaaaattccagagagcatggactgtttcctttgataatctgaccacagcttcttgcaggttcctgtgagtgaatatttattcattagtattttgagcaattgactatcttgacaaaaatcatggcccaaatcaaacatctctatctcttttatctccatttgtctggcatttattttccttgatcagctgttgaagctttggatcatttagtgtctgggtgaaactaatgtgtcgagaaagaaatggattttgagttagttttccatatttttatttctttaaagaaataacattctaaagagatgggatctcaagggaatttaaaaaaagtgttcatggttaaggattatgccagcggtactacataaaagcaaatgtgtttctttataaatcagaattgttagagcacacagcttggtttttgccacttaatgactctaaaattgttcttctgttgcagacaccgcttctctccctcccaaatcctgtgaatccagtgatcctgaacaaagaaacagtagctgtggccctcctcaccaggtagtttagaccattttccccctttttggacttttttggctatttaaaaattcttaccttgttgtgggtgattataaaatggtgcgcgttgtgtattcatgatggtggcatgttgcctttcctcccctccatatcagctggtcagcatggagagatggggctgagacgtggactgtttcttgccctcagtagcagttgctctaagatcaaggctggttctgggtaacagctctgggttcacattttgggaggatgcgacttgatttgggacgtatccgcctgagttggcataagagtgagcagcatatataatgtgccatttgttctctttgagccatattctcccaggactcaagtccattctgctctcctggttacccgctcccacgtgctcatctgtacttggacccttggggcctttggactcatggaaggatgcactgggtttgaggatcaggacagagaaaatgtagtttgctctgcatgcaagttctatgctgataagcttgagggctgaaaaaatcctgtcggggttagaattttagaggagagaggaggagtccttgatgattaaggattatggccagaacggctaagaggctggagttgccattaacgtagataaggaatgttatgggtggagcagtttagggggaaagattagacatctaattggagcttgtagattctgaaggtctctgttagatgtccacatggagatgctgaaggtgtagttaaattcaccagtctgcagttccagggagaggtactagctgtagatactggttggttggttggcaatgtttcgatgggagctgtcttttcacaggatggttcacttaagtaaacggtcaactggcagcactgagaacatagtatgttaatttgctgatatagagtcagcattggttatcatacatgaatgaatgagagttcattttctatcccgaatcataaattaggtagaatatatataaccaacacccttttctgacctgtacaaatgcaacttcagacaagaagtatttcaatgcgattctgtgattgtgtccccaataagtgtagatgttatcttcttttagcttttggaaaaggtaaacttgcaggctgggttttggatagcacactgggccagatgggttgggtttgttctgctaggagctgctttacctgaggcgacggtgcccagcaggtgcctgtgtggcccctgatcattctttcttggcacaggtatttacctgagtttccagggagctctgggcaataatattcctccctgcaattgggattcagctcagtaacctacatcttgccagtgatgtgtgtttttcaggcctgtaggggggaagggagtgctgattgatgctcagtcatgtattgggaaaacctaagtgatactattaatattagtgtcaacacaggtagccagacaacaagacatatgaggggcctggggcataaaggcaactgtgcctgagtaacaaatcgttagctcctagtacaagttccagtgactttcctcaggccgggtgtcaggaaaatggagaggtaatgttttttccatcagggccgctctctttggcacatacatcttttgatgcatttaatttggagctggaagggacgatgatgcaacaggtttcctttagaaggaccagtctctgagtgaaaggtggcagtggaagggagtgattgttgggctgtggggtggctggctgaggggctcgctcccaccccagctccaagcacggacagccaatagcacatttaagccaaccatgatttccacagcccttccgtggttatctttgtctatcaagtgtgtttctatcagacaagccaaagtgttcaggtctggcgttgtggggagggtataagctgggaggagattcagaatagggtcatgccacataattctcttcaaaatacatctagtatgaatgaggaggaaggggaatgtgaggtgcatttggatacctgagtggagaatgacgttttggagctcggagtggatgcttcttgatgtttgtagtgttctttttgaatatacacagggagagaaacttaagagttttctgctactgaaacatgtacccagctaaataatcaatcggtggaaaaagaacagtgaccctcgaggtgctgagccctggggactggtaacgtagtctcgtgtttcttatttcctgaagggtttgtcgtcttctaggggagccgggcacctcatcagagagcaccaaggcccttaagaaacaaatcaggactctaggaagttgaattatctttgtctgggctagaaactaatgagggttattaaataactggatctttctactcatcatggggggactttaggacaaagtcctaaagaagaggtctatctttgattatgaccaaagaaggactttgccgtcatgggcccaggcacggcctccacgttgcccatttggagagcctggatgcaggatgtaccatgggccgtgtttcctgggaagcacttagaggaggaatgagcaaaatgggccacagtggaaaggctgggcctggggacacagccgttcccttccatttccttggtccagagaagacatagaccttgttgtggtcaactggccacttgagagctgccagaatagtgaagctacagcttgtagaagcagtcagggtgacgctggtacagaggttccttttaagaacttccccagaccaggccccgtagccctgcagccctgccaggcctatgtcaccaggttcgtgctgtgtggggtgatgaggacctctgaattccgaatgccttggtccaaggtgtgaaaacaatgcagtcgtgccttcttttctcaaaactttctccattctgcaataagccttagttccttatagagcccaggagagacagctgagagctattcagagtcccgtctcagttttcctttcatcctcctctccgcatgcctcagtatgactccaatttgtcagagcctcctgagctgctgccgcatgttttgcgcacacaggcctcccaggcccagagctggggcccagcagggctcctgcccgagaagctggcttgttagagttcagggttgttgactacagattgcactattttgcagaaaccccgcatgaagctcaggtcctgaaaagcctgtagattagactgaaagatcccaagctgtgagccagcctgaagcaaacacttttccgatcgtggttgctgaagagctagttgggtcagaaaaatggcctatccatggagatgcggcaggcacaacagcaactaaagctcctgctttgtcttaatagatcgcagaacaggatagttttggttttgtgaacaggacggcaactgctgaccacatacactcgctctctgctcatgctgcatcctcctctgctgaaactggtgatctgttaacactcggcaatttcaggaggacttaactaatggatgactgttgactacacacaggctagtccagcatttctaggtcctcaataaacagttactcattaaagtggagaataccttccatgcccagcattatgctgtcacaagcaaggtactataaggtgtgtgcatgtgcagatagacaaagctcctttgcttttttttttttttttttgagatggagttttgctctgtcacccaagctagagtgcagtggtgtgatcttggctcaccgcaacctctgcctcccaggttcaagcgattctcctgccccagcctcctgagtagctgggattataggcgtctgccaccatgcccagctaatttttgtatttttagtagagacagcatttcaccatgttggccaggctgggctcgaactcctgacctcaggtgacctgcccacctcagcctcccaaagtgctggtattacaggcgtgagacagcttgcccggcctttaaaaattttttttgagacatggtcttgctttgttgcccaggctggattgcagtggcacgatcatagctcactgtaacctcgtactcctgggctcaagggatcctcctgcctcagccttccggagagctaggactacgggcacttgctgccatgcctagctaattttaaacatttttttttgtaggaatgggggtctcactatttgcccaggctgttcttaaactcttggcctgaagcgattctcccacatgggcctcccaaagcattgggattataagcatgagccactgcacctgacccctacttcctttgctgttaatcccaatcagttatgacaaaaatatgattagatcactatagatgaatatacaacctaaaaataacatcacgttttgggtcatttagaaaagttaaataatttcatatcaaactgcctttccacgcctttgtgatcagcggcactttgttttcttcaggggcccattgcttaaatatgcccccaggacggggaaatttgatgtgccagggttggcccacaggtcactgatgaggcccttgggaagttcagatttatggtcttcacctctagacatcaggactcagagggctgaggaggtgtttaagcagctctgctttttaggagaactcaatgtggctaggcttaagggttattggttaccttatagcaagaggggaatcaggagttttggaaagggaagagtggcaggtccccaagcaccaatctgcctcctccataacttcaccctgcacgatgggtactcagcaattctgctttgcccagcatcctgaggccttcataatggcctgtgcttgcccacctggagtgggttctactggggttggtagtgccatgctctttctccctctgccgggagtcagctgtatttccgcaagtagaggagtgtctggacactgaatccggagtctgggaaggcacccagctcagggcggtgtatggcgttaggaggagcagcaggtttccaggttacttgtgcccccatcttcaatgtcacaactctcaatctctcttccctgagttgtacacatctgtgtctacatctcaaggctgccgtgggtctctgaatacgtcatctttgtcatgaatcacccagctcaattttaataacatccaacagttagtaaaacaggaaactagaactttaatattttaggaaatggcagaatttgctgctgcaccagcctcccataactcctgcccctttggcatcctttcagttaaggtccagcatgccaaaggcacacactgccacggagatgagcaagacaagatgcagtggtgaaacctttttttcaaaccgttagttatcccctgatgctttcagtgctgggaatcctttgaaaatttcagaaaagtgggggcatgtctcaggagcagtgtcatgggggacaggctggggctggagttttgaccaccaaaggccagacactgtggccaggagctacaggcacaatggctgacttaggccaggtcctcagggggacgctgggttgtagacaatgggaagaggcaccagttcctagacctcttggtccccaggctgcctggagctcccccttttgctcatctccacctctaagcaccctctcctgccaatttcttccctgaacatgagacttcctgctcaagagatggggcagtccttgttcttgccaccacctggcagaaatggtggatgtatttccggaattctctattccggttttcctaaagaatgcttgctgaacacggaggtgcacccagcgcctataaataccgctgccttggtaccctgctggcgtagcagcagctctcagtacagccctgtgccaggaacacactgggttcttgttaaaatgcacactcttgggcctccgccaggcttgctggatcagaatgtctgggagatagggccaaagaatcagtatttttatcattctccaggtgatctgctttgaggaatttttttttttttgtcccagtgtgaaaactccacagacatgtatagcattgtttctaagggagggtgctctctgatttctagaagtcttcctacaactgtgcatttagaattacttgtacctcgtgtccctgctccaccggccttgctgcaaagcacagagaagagtttgagatgctcacggtggtgccatgatgaatgccaagtgaaaggtcttgacaccaaagactccactgtccacctggcatcctaccagggacactcttaattaacccttccatattttagatgggtcctaaagcacattgcattcaacgtaaatgaaaaaatagaaacctagactgtagagatctcaatcatggattaaattgtaagaagggtcagaaggaaaaaagagattcattttcaaaactgtcatatacaatatgacaattttcttctctgattatttctctgatgactgaatctacagttagaatatgtagtactgacatggttttctagacaagagtttccctgttggtgaaacagaatgaatttgggtgcaactgcagctgaaacacattagggtaaaagtaataagtaaaattagaaattcctactaaaataaccaattactgggaaaggcatgcttttttatttcaatatgaagccaggggatttgcaaatgttttttattttggcgaatatttaaaacaaagaatcctccttttcctctctttgtcctgtgccttaactcactgtcagtgcattttcctggctgttttaggaaattctctgtctctgtcattttcagaagatgggcatataaacaacttgagacctggatcaagccttccccacaaatcaccccctcattgagacaaacagaaatacatacttgataaatttagaaaacagcgatgtttgcacaacccagcagtgaaaacaaaagcaaacgacagtaggaatctctagcatattagcagcagaaggcacatgtcttaaagcactgctgacatagttccatccgctgtccagttttccctgtgttattgggagtcaacaaattaagagcgtgagccagagtaattctatcctcaagacttgctagcattccatcacattgtgaataatttatcatgcccagttacattatttaagatgttaagtgcagctattgtgccctggaacctgagctgccattctcaggactggcaggaaaaaagtgttgcacacattttaataaggcaatattatgagacaggcattggccactctggaggattaaatggtttgtttgggattacatttctgaatgagaacagggaagactatgtttctccctgatagggaaaagagacaggtgggtgatctatctggagtcagttcttcaattttgtccccctgttctagaaacaatgcacgctctttaagaagtttagaaatattttatattttcataaaaaatctagccagtaaagcaagaacttccttaggaaaattgaaacacaaaacaaaacaatgagtcgtggtaatttgccttagtcaaaacaaatactgattcttggaattggattgccctttagggcctgaacttggaaaacttctatattgtgtgttaccagaaataatgcaagaaaggaagagcttattttaacatttttgttcctctccgtaccttaattttatcttaacagatgagtgaagctctcttttcaagtttgcattttacagtgatctcaacccattaaattgacttttttcctcctctgttgccagcgggctgatcaacgtccacccaggccagcaagtcatccacaggcttcttttaatctggccagtcctgagaaggtcagtaatacaactgtagtatagcaaagccttccccaagctccactgagcacttggctgacaattcaaaacacggcgatggcatccttcctttccatcctaagactggcctgcagctttgccaacattacctgaagaggagatgtcggagtcatcagaactgatacttgacagtgagagaaggaatcgattttcccagagttcaaagtagaatgtgacttttaagaggtttcatggtttttgtgaattccatgaagttactaagtaaaagctgcaaattcatcataatttttctcaacattcaacactcctacttgttaatccaacaaatggtagataaaagtctgtattctaccatgcctttcaaaagtttttattatctgaaagcatatgaagatgatatttatgtatatttaatatgtaggggtattattacatattatcagtgaaatacgagtataaaaattagggtcaaccagaaatctgcaattgactgtcaaaactgagctcagttaaagtaagattcaattctaacatggatgtgcacgttcctaaatatcttatgattgaatatttacatgaaggcattcatttttatctgcccctttatcagacctatttgcatctcctcaaatgaattagatgtggcctatgctttgcagaggatggacctcacctactccgcacaccgtgaaaaaactggaaatgggcattgtagtctttaattaataaaaacaccaaaaatgtgtattgcctttcttaactcttcactattcagttggtcatttaaagaatcatagtattcgggaatcaagccttttccgagaaggaaaacaagagccttctgcaaaaatccatcacatcttcacaattatctttgctgactgtacattcacttcatttaaagttaacatgaatgttgttatgaagaataaattgctgcctttccccagtatttttctttttccatgtagatacagtcagtgaatttaactgcccattccaccccttcatatttaacctaggggcaagactgtgatttgaccgtactctgaactggttggtgcagatttctatgctggttataattagcaactgctttgagtccctcaagctcaaccatgctattgctaaagcagaatttgacttttaaaatatgtcaggattttagtgaattccttacggatacttagtaatagatgcaaatttgtcatggtgtttctaatcactcactcctgcttgctaatccaacaaatggtagagaagtcttacactaccatgatgtataaaatacttttataatcttaaatcacattcagccctaccctggaccgtcctataaaccagcaactaactgaaggggtgtattaatctgttctcacactgctaacaaaaacacacctcagactgaataattttataaagaaaaagaggtttaatggactcatagtttcatatggctgaggaggtctcacaattattgtgaaaggcggaggaggagcaaaggtacatcttacatggaggcaggcaagagggaactgccctttacaaaaccatcagctctcatgagacttattcactatcatgagaacagcccaggaaaaacccacccctataattcaattacctcccaccatgtccctcccacaacgtgtggggattatggaagctacaattcacgatgagatttgggcggggacacagccaaaccatatcaaagggtatttcctggtaccatttggagccaggcatgtgttttgattggctgatgctcatactgtatccattctgattggtcagtgcccatacaatatctattctaattgggcagtgttcatgccttactggttgtcatctattttgaatatcatctctgcttagaggatcctgaaaaaaaaaaaaaaggtaatctctcctaggaccatgtccctaacgtgagaaaattggctggctagattttagggagtagaactgaaatgcaaaatttcaaaaacccataaatattgctatatcatattcccaagagtcttttcgagggaaacaattgccaattcaactggataaaaatgagactcatttattatactaatttttttattccctgccaatgtggttctgtctttccactaccgtccttgaatggctacaaggagaagagaaagacaagaaggttcttgaatctctttaggcagagctaaatgggtgaatgccatactcttcacttaatagtttactctccttaaacaaccacagaattcagatcctaagataaggcaaatgccatgttatttatgccttttgtaacttttacagcacctgatatactgtaaatgttcagtaaatattgaaatcaaacaggtcaatattaagaaagcctatatattaaatacaagaaatatttatcatttgcttgctataagaataatattttgtggcaattttgagagtcaagggggttgcatataaaatataattgaaatttaagttttgaaatctggaggacaatggtaaataatttccatagaagtttctccaacttactacacgtttgttgagtcacactcaaaatatttttttcatttatcagattatgggattttttttttgtggtgtcacttataaataggctcttcttacagaatcttactccaggagtaaggtttctcagagggatcctctggccagtttttatttcacattaggtagatgcattacttgaatagaactatctagagctatactgtccaatactgtagccacatggggctatttaaatttaagttatttaaactaaataaaatataagattcattttatcggttgcactggtcacattgcaagggttcaatagctacgtgtgaccagtggctactctactggacaatgcgcatggtaggtttccattattgcagcaagttctgtaggagtgctcatctagagatagctacttggaaatgaccttgatgtgtcatatcatcttcatatgctttatccttttacacaaacacacaatctgtgttttcttcagcattatgtctgtgcactcagccagtttctatttaggaatcctgcaacacccaaggcagctctcaaccgaaaatggtgttttgctgatgtggtaaattcctatctcacttccacagtgcagagagctgtggcaggctcaagggggtggaatgagaggagtcaatcaaagcaaaacttcatggtcaaggttatttctcgggaagatgcagctctctgctaatgaatggccgatgagggctgcaaatttatttaaacaaatacccctcaaaattttatgccataaaaccctaaccagggaaaccatacctgtccatccctcccagtggtcttttactttggtttgtctgtcagattccaagcaggacccatgcaatcaaggctcttccatattactcagggtaaggacctaagtggtaatgccaatacctcgaagataactggagagcttgagagcttcctctgctctgtgtggccctgaccttggaaaactgttagggacactaaagttggttgcacgttcctaagagtttaatgacataaaaggtcaatagatgaggccggatgcagtggctcatgcctgtaatcccggcactttgggaagctgaggcaagcggatcgcttgaagctgggaggtggacaccagcctgggcaacatggtgaaacccatctctactaaaaatacaaaaagtagccaactatgcctgtagtcccagctactcgggaggctgaggcacaagaagtttttgaacctgggatgtggaggttgcagtgagccgagatcgcactattgcactccagcctgggtgacagagtgagactccatctcaaaaaaataaaaaaaaaggtcaatagatgcttcagagcaaacaagagatgccatgccagtacctgaaccccccctgttaaagtgcttgttgatgtctttgggaagaacaccatcctgtgtgaagatgaaggatggtctgctccgtgggacacatgaaaacttgaagagttcagagatgggagaatcaggtggagagcaggacaggaagcaagggttcaggggaaggtagtatgaggtgaaggtcttgacaggcaggtggtccagcaggccgggagccatgcctgtgggcctgaggaactgttaccatccactggaccaagggagcagggagaggatgatgggccggtgtggagagggcctctgactgctgctgtggccacaccatggaaatatggcagagagggagtcagagtgacagggttctggccatccactctctcttttcagtctcttgcttgtgcctccccctgatcacgcccaaccagagccagaggtcctggagaccatcagtgtagtccgtatgggtcagtcccctgggaggactgtgctggatacagaaggtgggaaatggatgtggagggcaggcagagcatttagcaaggagaaattgctgaatggagaatataaaggggatgggaggagaatgaatgatccatgtaaagtcagaaggaagggccttttgcctggtagtgtgctccactgcttaccttccttagggatgaagccatttactgagaaaggtgtaggggctaagagctcagctcactgaaagtttgctgaaagtccttgatacgttgcagatgggtaggagaaaaggcatacaaatttatttaatgtgtgtacaagggagccttcagaatgaagacccaaagatgcaggggaaattgtctgtttctatgcttaggcttaacaaagtatggactgccatgtaaaaatatgattggacaaaaagggtaagatctaatgctgataaactgagtggggaaatccagaatgacctgtctgcctagattcttcttggcctctctgagtatcattccttcctgctgggtgtgggcaggactcactctggaatgggagtctttttttttttttttattattatactttaagttctagggtacatgtgcacaacgtgcaggtttgttacatatgtatacatgtgccatgttggtgtgctgcactcattaactcatcatttacattaggtatatctcctaatgctatccctccccacttcccccaccccatgacagtccccggtgtgtgatgttccccttcctgtgtccaagtgttctcattgttcagttcccacctatgagtgagaacatgcggtgtttggttttttgtccctgtgatagttttctgagaatgatggtttccagcttcatccatgtccctacaaaggacatgaactcgtccttttttatggctgcatagtgttccatggtgtatatgtgccacattttcttaatccagtctatcattgatggaaattagggttggttccaagtctttgctgttgtgaatagtgccgcaataaacatacatgtgcatgtgtctttatagcagcatgatttataatcttttgggtatatacccagtaataggatggctgggtcaaatggtatttctagttctagatccttgaggaatggccacattgtcttccacaatggttgaaccagtttacagtcccaccaagagtgtaaaagtgtggaatgggagccttatgacctgcagtcaagcaagataggtcccataatttcttcatggccagtttttacatagaatatgtttaagttttatggctggctttagagaaaaggagttctggtttctatggcctgccttgggaaagagggattgtcgttttagctcgccttgggaaagaatgagactgagagacaagagggcaggagaaggtcaaataaaaacttttgcttctgaggccttcactttagggtattgttttctgaggcccaacagagcatcattgggaggaaaggaattcggctgcattgaacttgggtagctcccatctttgttgcccacttccatctcaggagaacaaggggattggatgatgggcccttgaagtcctttctggcacttatcttcatagagatgttcacacacacacacacacacacacacacacacacacacgcacacacactcatcctcacctgacatgacccagctgttaggactgaggctgcgctgtctgaatgcgtgcaagcatcccttgtccctgccgcattgggagggaactgtatttttgcggatggtaaatatttaattctcacctagcacagtgtgtaaatcatgccacatgtggtgatagcctcagggaaaacccactctccaacatttatgaagcagatgctctgacctcaagcccagacctctacaaaatgcagagtgtggggcagcaggctgggtcctcggctgaaagcaacccgataattgtcattcttcttttcttgggggagccatgtcatttataaaaatacaatgggattctgaacctcaggactggggggaggatttgtgagaattattgccccatcaatgtcttcagactgagacgttcgtgctctgccttctaagaatactgggttgacgcagtgggaaattgataaggttccaggaaactctatggagaaatgtagtacagaatgtattgattctgtttctcttcagaaaccttaagaatgtatgcacagggaagtcagttttggaacaggaatgtttacccaaggcctgtaccaacattgtaccttggaagtaaataacttatctttgattttacaagctcatgggtggaaggcacttgccttgagtctcaaatgagactttgggcttttgagttaatgctggaatgagtttagactttgggggactactgaaaagggatgactgtgttttgcaatgtaaggacatagctttggggggccagaggtataataatatgatctggatgtttgtcttcctgacactcatgttgaaatgtaatccccagtatcggaggtgggtttagtgggaggtgtttgggccatgggggtggatccctcatgaatggcttggtgccttccttgtggtaattcttgagtgagttcttgctctgagtttatgtgagatctggtctaaaagtgtgtggcacctcctcccccctctctcttgctctctttttcaccatgtggtggactggctcccccttcaccttctgccattattgtaagcttcctcaggcctcaccagaagctgaaaagatgctggtgtcatgcttgtacagcctgcagaagcgtgagtcaaaataggcctcttttcttgataaacctgaggcttttctgtataagactcaggtatttctgcgtagcaatgcaagaatggactaacacagctgtcaccatggcaggagcaggtgatggaagaatatgcccgccttcttggctcctcacagttgcatggcatgtgtgcctgtgtatttgtgtgcatatgtgtgtatatgtgcatgtttgggagtgttctgcttatgtttgtgtgtggatatggtgtgtctgtgtatgtatgctgtcgtgtatgtgtgtatgcatgcatgtatatatatgctgtgtgctgtgtctgtttatatgtctgtggtatgatgtgcattgtgtaaatttgcatgtgtgtgtgtataaatatatgggatgtgtggctgagtgtgtctatgtatgtgtgtgtatatgatacatagcatatatatgtgtgtatgtacatatatgtatggtgtgtgtgtctatatgatttgtctatgcatgtgtatgtgtgtttgtatgtctctgtgtgcgtgcatatatggtctgtatatgtgtgtttgtggggatttgtgtgtttgcttgtgtgtgtgtgtctttgtgtgaaaagcaaggaagggagagagacatttgttttgtgtctgccacaggggtcagcaaactatagtccacaagccaagtccagcctgctgcttatttttatatggtctgcaaactaacaataatttttacattttcaagtggttgacaaaaaatcaaaagaagaattatatttcatgacgtgaaaattatataaagtccaaatttcagtgtctcacaagtaaagtgtatgggaatgtgactagtgctcattcacacatagtctgtggcttctgtcatgcgacaatggcagagttgagtggttgtgacagcgactgtgtggcctatgaagcctaaaaatggactacctggccctttgcagaaaatgtgtgccagcccctggtcttccttacatgggaacttttcatggtttatctcgtttaatccccctttaatcctgtggtgcttttttgtcttcactgtaccaatgcttgaggtaagggcaggagcctggagtcacatagcttctggtctgagtctttcagactccacgatgggcacactgtctactctccctgccgggtgacacctccctctcaacctccatcactcttaggataaaatctaggccagatgcggtggctcacatctgtcatcccagcactttgggaggacaaggcgggcggatcacctgagatcaggagttcgagaccagcctggacaacatagtgaaaccctgtctctactaaaaatacaaaaattagcctggcatggtggtggacgcctgtaatcccagctactcgggaggctgaggcaggagaatcgctgagcctgggaggcagaggttgcagtgagctgagactatgccattgcgctccagcctaggcaacaagaatgcaactctgtctcaaaaaaaaaaaaaaaaaaaaaaatctgaaatcctaccatggcttaggaggcctggccaggtctagccccaacccaaccctggctgtgcacctttctctccccagaaatcacactcttgtccctctagggcagaaagtccctcaggcgtccatgccctgtctgtctcagggccttggcgcttctgcttgggcatccccctgcagccatttcccagatgcagagtcagcagcttattccttccccagcatgtcctgtgattgcatgagggctaattcctataatagatcgctcaacacatatcatctgtgtcataatgctttcctgatgggactctaacggatacaccctccctgtgccctaccaacccccagactggattagtgcctctgttactatgtcaccttagacttctacttcaactgtgctgatcactaatggcataactgtttgcataattatttattggatgcttattttccctttaaattccatgaaggtgggtaggctccatgccagccttgtccctaccatggctacttaaatcagagcatgcattttctatgcagaatacttacagaatgaatgatttattctaaaagcagagaggggacatgaacattgattttgcttttaagtggtggttcacattgtttgcagaatctctcagctgtctagaaccattgacaagtgcacttgagtggccactttccactcgctggctcacctggcgccccagcttctcaaaacagggggacacaggcatccccatgtggctgaaagacacacatttagggtaattatcattatgtattttgtttgtttgtttgtttgtttgtttttttaattggccagaaggtcattgtagagttggaatttccctttgtggagtcccagaagcatgatgcagaggaatgagcctggaaagaagagattgagcctagtttcaacttgctgtgtggccttgggcatgtcacctcactcatctgagcaacatgcttattggtaaaagacctggttcttctcccagtgtgcctatgggtccttgagtttcttaattattgatgggtgcttgtgaacttttagttggagggaggattcctggatgtcctacaatacataagaaaagcctgcaaaactttcaaatatccccagagacattgatgtaattgataagcctgcttatctgagataatttgtcactataaatatttcaccatatacaaaaatataaaatatgttgttcatacatgtaaggtactctgaattttccatgaatataatacctcgaatatcagggaaggttaaataggaaaggacggcattccatgaatgctacacctcgaatatcaagggaaggaatatcaagggaaggttagctttgttaggagcttcatcaagaattgcttgcaattttagaaaacttatcaccaatagcactgccacttgtagtcttgggttgataatagaacacacatatacccatttaacttataactgttgcatttcttgtgattccaagtatagatttgacaacttcatgtgtctactggtgtagacctatcgaacgctgcatttgctagatcataaacaactttccttttatgtctgctttatataacatagtgaatcacgttggagttttttgtctagaagtttaggtatataggtaggttccctaatcaattaatttcagaatcataaaataagcattgcaaaaaattgctattcaaaatgaggctgcattggaaagcactggagtctttagacgatctgaatgtgaatatccttttagctttaaaacatgtctgccttttctccattccacaatgccacatttgatttctaaaggaggtttggcaaagggaaaagagagaaaacccaaaattagcatgttcaggtatcgatatcttcttcttccatctgttcttcctcttaactgaatatttgcatatttattgaaaacttttagagcaatggaggagcaccagtgacatcaaagcttcttgggaattgtgttgtgcttgacattgtcttgtttgcaaaatagatttttccagttgcagaatttagcatttacatgcaacaaaacttgccatttaacatgatataagggttctgtgtctgcctaggatgtagaaaactggaaagaatgtcattcagactttaaggagaaaaagccagattaactaccaaatcatggcttttcctgaacccatcagagagccagagagcaatcaagtagctggccatcaaggaaggagagtctctcccccaagaaaaggcagtgcacaagcaccctgggggtaccagccacaggggttcacactcactcacagactcttctgtagacttccaccagtgacccctcagaaagattgcagaggggagctggagagagcgtctttggtagtgcaggtctatagggcatgattggcaccactgaaggggtagggggcctgggtggcagggagaaggggaagaagcagaaaaccccacccttctgcctggtgcttccctcattgcaaaagcctttagctgttgacagaggaggcagtggaatttgtagcctccaaggcatagaaacagacccattgctgctaagggaaggctagaagacaaagcttctactctgggacagaaaaggccttgggctagtgtattagtctgttttgtacggctataagggaatacctggggctgggtaatttataaagaaaagaggtttatttggctcatgattctgcagctgtgcaaaaaacatgatgctggcatctgcttggtttctggtgaggcctcagggagctgctactcagagcggagagtggagggggaacagaaagtcatatggggagagagggagtaagagaggggagggaggtctcagactctttaacaatcagatctcatgcgaacccactcattaccatgaggatggcaccaagacattcatgagggatctgcccccatggcccaaacacctcccactaggcccacctccaacacagggaatcaaatttcaacatgagatttggaggggactaaaattccagacaatatcagccagaatactattccatcaccattaggatctcctatccctaggggagggtaggaaggctcacaacagccagaaagcagagcttggctttcatgggaaggagggtcggggacacttagaaagctgctggagggtgccaggatattccaccctaaaatacatctctttagcatatggattattttgagctaaaggccactgacaaccagcagatgcagaaaaagctctaaaaatagggcaaagttttctttatgtaaaagaaatttgcatttagaaaggaaatttccatttggaaatgtgtctccatctcccataccaggaagaggagaactcttaacttttatcaatggagaagatgcagactcaaatttgcatagcaaatctaacaaaataacctttgtttactttctctggtccaattcccataacttgccaccttcccttcccactccccatattccccttacccacattcctttgtataacatggtatataagcctcaatcatctggcacctccctgagatggatttttttctttgtgaactcccaagcatttttcataattaaaatggtttttttcctcttgctaatctgtcttttatcagtctgattccctgaccccagccattgaacctaggagagtagagggcaaaacattttccttcattatgctatattcttaagccccaaacacacaaggactatctaagactgatgcaagcctaggacaacagagatctgcttgcaacctgccaccagccttgcaaatactgagtgacaaacagcagcatctactgatggtgaaggatggaacttgaagaaacatcctctgtgaggctggcacataggattgtgcaaaagctgagttagtggagtaagatcagtgagaaaaacctctgagcactaaagcccccatcctaagctaaagcattgttaatgggttgcaaaagctttggcacagggatggtaattgtataagtttactagggctgctgtaacaaagtgccacaggctgcagtagctgaaaacacagagatctattttctcatagttctagaggctagaagtctgagatcaaggtgtcagcagggttggttcctttgaggcctctctccttggcttgcagatggtcatcttctccctgtggcttcacacagcttttttgtggtgtccatgcatccctgttctctttaataaagacatcagtcagattggattaagccttaattatgatttcaattaaacttaattacctctttaaagaccctatctccaaatacaatcacatttggcttcaacatagaaatttttggggaggggacagaattcagtccataatagtaaccatagctaaaacaaaaacctaaagcagttcaatcctaactagatttactcaatgccacttcttgtcttaaaaaaaaatcacctatcactgtaggtattttccctattgctgcatagtcgtcatggctgccatttttaatggctgctgatggtttctttgagtgctttcttgttcttcacttatgcctttctctatcattgcacattttaggttagttccatttttttcccgtaaagaaaaatcctcatgcacatcttttcccatagtttggaatagtctctcaagataggttctgaaaagagaaatgactgcatcaaagggcatgactcctgtcatgggctgaattgtgtccctccaacattcatatattgaagctctgggtcccagtgagatggtattggagatggggcctttgggaggtaattagggttaagcgagttcagaagggtggggccttaagccaatggaactggtgacttcataagaggaggtggagacacccaaaagctctctgtctccagctgccatatgagtacacagcaagaaggtggctgtctgtaagccaagaaaagagccctcaccaggaatgggatttgctggcattttgctcttaaaattctaatttccaaaactgtgaaaaaaaaacttctttgtttaagccacccagtctgcagtattctgtgtgagtccaagcaaatgaatgtaaccccttttatatgcattacttttcaaaaaatgtatcaacctgcccttgcctacattaacagccatctgcctttttttctgagtgtttgtataaacttcttagtacttatcccttctaaattaagttttctgtcatctgtaaatgacaattcacatgcactccctcatgtaaataatttacaaagctatatgtcagattctagcactaatatccaataattcaaaatcatatattttgtatctttaagcccatcaataacaaagtagtccttctaattctgatatttctctttttctctctatttcttggataatcttgttcatgtaccaggaaacacacacataataaaaatcatctccctccaaaaaactcaaacaaaccccaaaccccaaataaaaaactctaaggccatacaaattcattcctaacccctataagtattttaacataaacatttttctaaagcatatttatatgtatcttaatacacaaaaagcgttagttaaatccttgttgctgttaagtaatttgtgttagtttagaaaagggagaggaaaacttaaatgaaacatttttctttcatgtgagtcagcaaatactgtgagtgaaaattatacagaaattaaaaatgaatagccaaggagagatttaccatagttggatgatttgacttctaagataaaccctgactcacgctagaaaatggcctctctgggactccagaagtatcatgtcaatggaaggccaaattttgttcagaacatttattttattatctttgatagaagctacttcaaagtcaggcaacaaacatttattaatcttccaaggtttcttaggacataaagaataaagtgctatcctcatagaattttcaagttattggttttgtcaaattgttgttttaaggttgaatgatgattgcaattttccctgtggacttgcatttgagttctcacatgagctaatactctctgaaagagaaaaatttctttgcttctcaggtctgtttactttatatttcttctctatttagtttatttttcttgcagccaatgtacaggtcaggactttttgaggtattagtgaaattttcagatgatccaaaattgtcactgtcttagtttgtttcatgctgctataacagaatacctgagaatagatactttagaaagaacagaaatttatttagcttatagttttgagcgctgcaaagtccaagagcatagtgctggcatctggtgagggcctttgtgctgtgtcatctcctggtgaaggtggaaggaaaagagagaaggagacaaaacaagagagcatccttgtgagagacagagagagagaggagaggaggggaggggagggaagggaaaggaagggaagagaagggaagggaagacagctgaactcatccttttgtcaggaacctgctcatgtgataatacactcctgtgatataatggcatgaatccacctatgacaacagagccctcatgacctaatcatcttttaaaggtctcacctgtcaatgctattgcattggagattaaatttccagtatatgaacttttcaaacctatagcagttacttggaattaaaattggctcttaaattcagtttccttatcattcaatttcctgacaaaacatgtgacccagtagtagcaaaattgatggagaggaggattttagtttgagtctcctctcccaccaaataaggcgattccagaaagcaagagttagagagtagggagattgacagagggtttgtcatacaagggtaccctcatatgttatcagtataatacataaagccaataggggttgcttctgtagttgatgagggttcaagcccagtggagcccctgcaaggagtatgggatgcctcccagaaaggtctgcttgaaggacaggagggtgcaacatttattcatctgttcccattcccattggttggggatattaacctcctcctcccttgctcccaactactgagaagactccagagcaggcaaaagtgaaagacccaaggtggccatctgaggtgagatgctgcaaaatgcaagatgggtgatatggtttggctgtacccccctccaaatctcatcttggactgtatctcctataattcccacgtgtcatgggaaggacctggtgggtggtaattgaatcatgcgggagggtctctcccatgctgttctcgtgatagtgaataagtctcatgagatctgatggttttataaatgggaattccccctgcacaagctctcttgcctgctacctttgtcttctgccatgattatgtagaactgagtcaattaaccaagagttgactttttaagtctttctgttttattggtaaactgctgagaaattgtactacacttgcaactactctttgattatgataattataaggaaacaaattaataaatctgggggtattaatggacattcttctgttgttcttgatatgcaattggttcttcttgtacagatctgtaggaatagctagacttaaaattagtgcatgtgacatgctttaaacatatttgttttttcagggcaattgtgggcaagtgcaatagcagcctgcaagaatgcaacatttatgtatattctctggaaaatgcacaaccctaaccttccaagacaaagacaaattgtagtaagagcattgactatggtcggccatgtttaaggataactccagaatactcttgactttttattccatcattaagataaaaataagtaataacatgtgtccgagtgtgacactacataaaatcaagctgtgatttatgccttcttaaaagtttaaaatactgaacggattactgaggttagaaatgaaataatgtagagtcaaccaggtgaacatttaaatgaatgttttaaaaagcaggctattaacatcattaccaagtagcaaggtagtgagtattgttatgagatttcatgtttcctttggggagggtgggctgggagattttgccatcgttttcacatagtagtaagcttttttttggaataaatggatttcaaggactgcttaaatttaggatgagataatgataggggattggagatgagtagactgggattccaaagatgacttgaagatgatgaaactgtggtcagcagtgcacttagtacattttgcagagaagaacacatactttaggcatttccagaaaagaatacgtactttaggcaatctagcaaaagttgttgctcttaataacgctgaattaatggataaagagagatgtagatgtgtaaaatgaagaagcccagtgaaggttgaagaaatacatggaggtggtggattttgcccttcactatgggagggaaagatgttggagagatccgaggggaaagaagtaataggaagaggaagaggaggtcagggtatagcccaagagaagtcaggcagcagacacatgatctagtgcgaaacaggctttaatgatgagcagggatgaaccagaataaagaacatggaaaatattattaaggacctaccctaggggaaggtctttggtaattcgtgggtgatgtgttactgagaatctcctgaggaaatgagtagttttgaatggccagattctcctcagagcacttttaccatacatcatcttccactgtgtaactgaagtccaagtttcacttcccattttttggttgttaagtccactcattaatgatttgagcagagtctgcatggaaacaggtctccagacaagagtctcttcagtactgccaagtgcatagctagggatttctcctagaaagactgcctgtctctggcacacctctcattgaagcgtttaaggggtgcacagggcacagtaatccttgcaagacttctccttccccagcctctctaccggtctgaggatatcattagggctacttatccactttctcctaaaagaccatgagaaataatctcatcactctgtacttctcagcgtctaccagaatgtcaagcctttgagaagacactttccccataccctgacttgtgccctcaggaggttcttcacattccttaagaggactcaatcttccagcccttccttaccaagcagatacttccactgtgtcctctggaatcagcactatcatcagcaaaaccccgtgtacgtccagtcttttctcagaaagttctcttctttgagatctgctctcccctgaggaccctgctttctcctgtagtcctcttgaatggtggctatttcctctcccattctgcatggagtatagagttgggaagtatgggagttatcctttctgatttgcatgatctcttcttgatcattttcttccccctttcctaaaaaattctggtcctttgaggtaactgccattaccatatgagttagtctgggttctccagagaaacagaaccaataggctatctatctaactatctatctatctatctatctatctatctatctatctatctatctatctactatctctatattatctatctatctattatctatctatctatctatctatctatctatctatctatctatctatctatcatctatctatatcttctaccaagtgatttactgtaataaattagctcatgctattatggaggatgagttcaagatttgtggtcagcaagttgcagactcaggagagtaaatggtatagttcctgctgcccatcttggaaggcctgggaaccaggagagccaatagtgtaagttccaggcaaagtccaagggcatgacaaccaggataactgatgatataatttttagtctgagttcaagttcaagggaaggagaagatcaatgtcccagctcaaagacagtcaggcagagaaagaattccttcttactcagcctttgattctattcataccttcaatggattggatgaggcctactcacactagggagggttatctacttgactcagtctactaattcagttgttaatctcatccagaaacaccctcacaccgacacctaaaatatcatcctttattgtttggataagtggagtattggaacaatggctaaaatgagaatagagaagaaaaatttaattaaatatctggtcaccatgtggcccagtcaaaatgacacattaaaattaaccatcactctgcacttgtcacaggcctcagctcatcttctggttacttctccttgctcgctaaaggttataacattcatgtcattcttactagctagggaactatagagaaaatatttttgtgtttctcgagttagaattttctgggcaaattttattaaaatttctttaaaagaatatgacttgaaagctgaagaatgattagatactgacagactttccagagagatttatcctcctgaaggcatgtgtttacatttcaagggggatgagacctgggaccatggacatattcctgggatccaaatctggagacactagtcttctcttccttttagaaacatttatttatattctgaagtgtaaaatccctgggtattttctaaagaaaatttatttacctagggagattatttctctgtctcagaacggaggagggctactctctaagtcagcctctgtaactacccaggtttatgatgtcattgcagagcatggtatatggagggtgatgtctgatctggctttcattgcaccaccttacgggtaagaataaagcatggagggaacagtatggttactgtaagtaagaattattttattttatttttttttgagacagggtctcgttctgttgcccccaggctggagtgcaatggcctgatctcggctcactgcaagttccgcctcctgggttcacgcctttctcctgcctcagcctcccaagtagctggtactgcaggcgcccgccaccacgcccggctaatttttttgtacttttagtagagatggggtttcactgtgttagccaggatggtcttgatctcctgaccttgtgatccgcccgactcggcctcccaaagttctgggactaaaggtgtgagccactgcgcccggcataagtaagaattattaatctgttcttgcttcagaacatctgtcttttcaacttaatacgaacaaatataaatattaaacacttcactttgtcttcaaaactgctcaaaacacttcactttgtcttcaaaactgctcccagaattttcctagcatttttggtgattcaacattcatgtcaaaccaccacacttgggctccccagtttcttcatttcctcattgttgcatgcacaaatttttctctgctctatctcagccacatcctactccttcggttattccttagacctccaaaattttaattataagcatttttctccaagatctccctcatttctttacttatcttaatcattctcttccaacagcacttcatctactttgggaatgccaatgaatccgatttcttcttcactcgtcattacctctatgtctgctctttcttttcttgttttttattgacccagtttagagtttacagagtccttaaatataatcactactttgaaaacatcctcagctgttttgctcctcttgactttgcttggcaaaactcagccttggctaaaacttctggccatttcacacctgcatccaagcaactgaagttggctagaaacaattgctaccagcatggactggttccactttgaattcgtaacacaacctcatgtaggtcctcagcactgcctgactaacctgttactttctgttgtcaatttttttccacacccagaaacaactatttcatactttcttatctaccctcaaaatgccaatatccttctgtatcagtgagtttttgctgtgtaacgggcaaggacacaatcccagtggcatacagtggtaaggatttgtaatcatgctcacaggtttatgcatcagctggagctccttgtttcatgtgtctctcattattctggtaccgcctggttgccaagggcatattcttctcttgacagtggcaaaagcactctgttcacttcatatttactcaaatatcattggccaaactaagtcacaaggccaagtcccacatcaatgaggtgggaaagtatattcttcagatggagatggcagggaaagggagcgaatatttgctgaataataatcactcccaattgatgaccttgctttatttcattgaacaatcaacagagatctaccttatgttttccccaccaaatctgctaacccaacagcatttgtccgtctcatgcactctgcctttgctcctgtgatacagggcctgctgtgtctaagcccaacccctccaactgtgccttggatatcactgcttctgtctatacagctggcttccttggatcatcccttttctcttctctcatggatcactctcatcagcaaacatgctgtatgatctcccataccaaaatgttgttctttgaattctcatctgcttctagtcacgaacttaatttgctgatctttacagcaaaaccttcaaaagagttacttccccaaatcagtttccactctctcgtctgtcaggctcccttctttccattcctatgaaggattaattctccacattgcaatcacttttgtcaaagtcatcaaccacctccatcttgtcaaatccaaggcacaatctgcagtcctcatcttgtgtgatgcaccagcaacatttgatacacttgatcacttccttcttgaaatctcatttggtgtctatgaacctcgattctccccatcccatgtcactagcttttctttctatactttttatttttaggattgtcctcttcttgtgacctctaaatattggttgagactggactaagagtcattctggactcagttttttgttctcttctcttctttatctacaactcctccctaggtagtttcactgtctcatggctttaaaaaccataaatatgatgatagcttcatgttttttctttatctttgacctcctgcactaaactcaatatttgttatccaatttgctatttggcatctcatgtggatattgaatggacacctcggtatacataggaatatcagatttcttcccaaactcactgcccctcaaatcagtaaatggtgctgctagtagtcaggctacctggctttggttctcttctttacatatttcattcattgtcttgttggtaatatccttaaaatacatctggaattcatctatttgtcatcccttctgtggtaggcagaattgtggcccctcaaagatgttcatgctctaatccttagaacctgtaactattactttacatgacgaaagagactgtgcagatgtaattaaggtaatagaccttgagacaggagattatcctagattatctgagtaagtccagcctaattcacatgagcctctaaaagtagaagagaaaggctgaaatgtgggtcagagagatatgacattagaaggactgaactgctgctgctggctttaaagttgaagaaaaagggtcacaaccaaggaatgtggcagcctctaaaagacgaaaacagctgtcattttacagcttggaagaaaacagagaccttggtcctttggccaaaaacaaactgaattctcacaactcaaacaggaaataagtcattccctagagcctcccaaaaggaatgcaaccttgcccacaccttgattttagtctcaggagaccatatcagcctctgatctacagaactgtaggataataaattagtgctattttaaggcattaagtgtgtgacaacttgtcacaactgcaatagacaactaatataacccccattactatcatcccatcaaagccagcatcatctctcccctgcaatagtcaactgattgcttctactccataaaataatcagtgatatttatttatttatttatttatttatttattgcgatggagtctcactctggcgcccaggctggaatgcagtgatgcgatcttggctcgctgcaacctccaccatatgggttcaagtgattctcctgtctcagcctcctgagtagctgggactacaggtgcccgccaccacacctagctaatttttgtatttttgttagagatggggtttcactatgttgggcaggctggtcttgaactcctgacctcaaaaaatccacccgcctcagtctcccaaagtgataggattacaggcgtgagccacgatgcgcagcccagagtgatattttaaaacgtaaatcagatcatgccattctcctgctcagaaacctctaaaagtttaccaatacattaaataaaacccaaatttttggccatgacccataaatctctgcatgtctgatgcttgcatgtctgcgtaaattaacacgatcttgcattcttccattcttttctcttgttttactccagccaaactggtcttcttgcaaaattctcaaacacaccaagctcatccctgtctcagggcttttatccttttagcacccttgcccttgaatcttcactccttccccagatactcaccaggtttgtttcctcattttattcaggtctgtgtttccatggttcctccatcagcggaactctgacaaccgtatataaaatcactccatgtcccactcctgtcacctctatttcttcacctgctgcattgttcttggtagcatttatttgtgtttgaaatgagtatcatggattcatttctttactagtttattgtatgtctctgttcccaaaagctagcttcatgagggtccctgaaaattctgtctcctgtgttgctgtattatgtgtttctggctagacagctcctggcatataagaagggttcaatatgtttttgttgaatgaataggtaaagggcagagtgtggctagggtgtctgagcctttgattcaatgaatccatctcttccatgcctcacatgtttggcagagggagtaaagagagacactgaattttctaaatgattaattctttatcaggctgatcaccacatctgtgagttcactgggtgcagggtctctgtagagctacagaaggcagtactgctgaatgagtcggctggcacattgtgtatttcccaacacagcagaattagggtccctgagacaagtcaaacgaggagcatttgaaggcctggtcagctgctgcctcaggactttggggctcaggcgtttaagagttcatgacatttttcttgcttctttggttttctgctgaacctacatgcttctcaaatatgatgattactggaagaagattctcccctctttccactcacaatgtgagctggtcccatgctgtcaccacctgggggagaggtcaccaagcatgatcttctgattaagtcaggcatccagcatctctcatttctgatgacatcactaaaatgttgacaagggcatatgatgctaaaaaatacttatttatagaacaaacccctttgtttagggaggtgagtctggcagatgtgtccttgggcctgtgaggaggacttttccattttgcagcttacttcttcccacctgtgcttcaggacccagtttgcacagtagaactccaccttctttgttcacgtcatgagtttgtaagtttgaccaaatagtgctttgttctggtcaagtccaggatcaagcagcattttctagtgcacgttgactttaggatttcatatgtcgtgatctacaactcaggagccatgctgagctgcattcaaaaagtgccttgtgatgggtaacaataacccttgacatttattggagacaactatgtgccagactctgtgtgagaacagcactatataggcacagtcccttctcttccattctctttccaccagcttcattctggcttctgttcccatcatagcactgaatcagctcaggtcaaggttacccatgaccaccatcttgtcaagatccaagagaatcacatgggtcccctccctcgcctcagcatttgattcatttgaccacttgcttctttttttcccaccattttttctatttcaataggttttgggggaacaggcagtgtttggttacatgaataagttctttcatggtgagttctgagattttgatgcacacatcacccaagcagtgtacactgtgggcagtgcatagtcttttatcccttgtcatcccccattgttttccccaagtcccccaagtccaatgtatcattcttatgcacttgcatcctcataggttagctcccacatgagtcagaacatatgatgtttggttttccattcctgagtgacatcacttagaataatagtctcaaattccgtccaatttgctgcaaatgccattattttgttcacttttgcagttgagtattattccatagtgtgtgtgtgtatatatatatttatcatatatgtatgacatatatatataacattttctttatcctttttctatatatatatataagattttctttatccacttgttgattggtgggcatttgggcttgtttcatatttttgcaattgcaaattgtgatgctataaacgtgtgtgcaagtatcttttttgtataatgacttcttttcctctgggtagacacctagtagtggtactgctgaatcaaatggtagatgtacttttagttctttaaggaatcttcacactgttttccacagtggttgtactagtttacattcccaccaacagtgtgaaagtgttcccttttcacggcatccatgccaatatctatttttttaaatttttttgattatggccattcttgcaggagtaaggtggtattgcatcgtggttttgatttgcatttccctgattattagtgatgttcagcattttttcatatgtttgttgactgtttgtatatcatcttttgagaattgtctattcatgttcttagcccactttttgatgggatcgtttgtttcttttcttgctgatttgtttgagttctttgtagattctggatattagttattgttggaggtatagatggtgaagattttctcccactctgtgggttgtctattaactctgctgattatttattttgctgtgcagaagctttttagtttaactaagtcccatctatttgtctttgtttttgttgcatttgcttttgggttcctggtcatggggtctttgcttaagcctatgtctaaaagaatttttccaatgttatcttctagaatctttatggttttaggtcttagatttaagtctttggtccatcttgagttgatttttgtataatgtgagagatgaagatccagtctcatgtctctacatgtggcttgccaattatcccagcaccgtttattgaatagggtgtcctttccccactttatgtttttgtttgctttgtggaagatcaaagtatctggatttatttctgggttatctattctgttccattggtccatatgcctatttttataccagtaccatgctgttttggtgacaagtatttggctttatttcttggttctctattatgtttcattggtctatgtgcctatttttataccagtaccatgctgttttggtgtctatggctttatagtttgaagtcaggtaatgtgatacctccagatttgttctttttgcttagtcttgctttggctatgtgggctcttttttggttccatatgaatgttaggattcttttttctagttctgtgaagaatgatggtggtagttgatgggaattgcattgaatttttagattgcttttggcagtgtggtcattttcactatattgattctaactgtttatgagcttgggatatgtttccatttgtttgtgtcatctatgatttattgcagcagtgttttgtagttttccttgtagaggtcttacatgtccttagatatattcctaagtattttttttttttgcagctattgtgaaatgggttgagttcttaatttgattctcagcttggtcactgttggtatatagcagagctactgatttgggtacatcgattttgtatcctgaaactttgctgaatttgtttaccagttctaggagtttctttgatgtgtctttagggttttctaggtatatgatcatatcatcagcaaatagcgctgttggtatatagcagagctactgatttgggtacatcgattttgtatcctgaaactttgctgaatttgtttaccagttctaggagtttctttgatgtgtctttagggttttctaggtatatgatcatatcatcagcaaatagcgacagtttgacttcctgcttacaaatttggatgccctttatttctttctcttgtctgattgctctggctaggacttccagtactatgttgaatagaaacagtgaacgtgggcatcgttgtcttgttccagttctcagggggaaagcttcaacttttgcccattcagtatatgttggctgtgggttgtcatagatggctttattacattgaggtatgtcctgtatatgctgattttgctgagggttttaatcataaagagatgctggattttgtcaagtgctttttctgcatctattgagatgatcatgtgattttttgtttttaattctgtttatgtggtgtatcacatttattgacttgtgtatgttaaaccatccctgcatccctggtatgaaacctatttagtcgtggtggattgtctttttgatatgctgttggattctgttcactagtgttttgttgaggatttttgcatctatgttcattagggacattggtctgtagttttttttgttatgtccttcactggttttggtattagggtgatactggcttcatagaataattaggaaagattccctctttctctatcttttggaattctgtcagtaggattggtaccaattcttctttgaacatctgttagagttcagctgtgcatttgtctgtccctggactttttagtaggcagtttaaaaattaccatttcgatctcactgcttgttattagtcactgcttgttattgatctctgttaagagattccatatcttccttgtttaatctaggagggttgtgtatttccaggaatttatccatctcctctaggttttccagtttatgtgcataaaggtgctcatagtagccttgaataatcttttctatttctataatcctttctatttttatttctttcctatatcagttgtaatatctcccatttcatttctaattgagcttatttggatcttgtcttttcttttcttggttaatctcactaatggtccatcaattttatttatgttttcaaggaaccagctttttgtttcatttatcttttgtgttttttttagtttctgcaaatttggttctgatctgatcttcagtatttcttttctgctgtggggtttgggtttggattgttcttgtttctacagttccatgaggtgtgaccttgaattgtctatttgtgctttttcagactttttaatgtaggcatttaatgctataaactttcctcttagcactgcttttgctgtatcccagaagtttcgatagtttatgtcactattattgttcagttcaaagaaattttaaatttccatcgttatttcattgttaacccaatgatcattcaggagcaggttatttaatttccttgtatttgcatggttttgcaggttgcttttggagttaatttcaagttttattccactgtggtctgagagagtacttgttgtaatttcaatattcttaaatttattaagacttgttttgtggcctatcatatgatctagcttggagaatgctccatgtgctgataagtagaatgtttattttgcagttgttgggtagaatgttctttaaatatctgtgaagtccatttgttgtagggtatagtttaagtccattgtttctttgttgactttctgtcttgatgacctgtctagtgctatcagtggggtattgaagtctcccactgttattatgttgctgtctatctcatttcttaggtttagtagtaattgttttataaatttggaggttccagtgttaggtgcagataaatttagaattgtgatatttttctgttagactagtccttttatcattatataatatccctgtttatcttttttaactgctgtcgctttaaagtttgttttgttggatacaagaatagctattcctgcttgcttttggtgtccatttttatggaatatctttttccacttctttatcttaagtttatatgaatccttatgttttaggtgaatctcctgaagacagcagaaacttggttagtgaattcttaaccattctgcctttctatatcttttaagtggagcatttaggccatttacattcaatgttagtattgcaatgtgaggtactgttctattcatcatgcttcatcatgctatttgttgcctgaacaccttgttttttttttttcctcattgtgttatgttataaagggagtagcaaattctctcagcatttgtctggagaagacttcttgcaagctctgtttattttttaaaaattcctttttctttgtctctgacggattggattaattcaaaaccttgtgtttgagctctgaagttctttctttttctttgattctattgctgagacattccagtgcattttgcatttctctaagtgtgcccttgatttccagaagttgtaattgtttttttatttatgctatctatttcaccaaagactcttcctttcacattctgtatcatgtttttgatttctttaagtttgaccacttgcttcttctgagccaccttctttgttggctcttatgttgcctcattttcttgattttcctgctacttcaaattgctttctttagtgcttgtttttataagattgcatgttggaggaccatttcccttgtccttgttttcctgtttgtttacactctctctgtaggtaatattttatggtccaatgattttacataccactcatatgctaacagcttcccagtttatcttagccttgtatataaaatgtccccttgacatctctattttgatgtctactaggctgctcaaagtaaaatgtccaaaacagaacttttgatcctgtataaaatatggagaaaaatctggaagtagatcttaattcttttctttccttcattgtgacatacaaatccacagtaagtcctgccaactctaccttgatactacatttccttagctcatccactaggctcatccccatggctcccatgcaggtccaagccaccatcacctcttgtctagaaaactaccctagactctttatggtctcgttgctttcactctacctccagtacgtgtcattctcttagcagcaagaagagtctttaaaaatgtaaatcagataatattatttccttattaaaactatccagtggcttcccattatacataaagaaaaaaatcctccaagatttcttaacctgggtgtgcctaattattctgacttcagttatccccccaacccttgcccaccccatcagcacacatatgcactagatgaccatgttgcagcttctctggtctacctgccttccccacattggttgatcttctttccgtctcatgacctttgcatttgctgatcctctgccttcagcactgtttccacacatcttcacaccattcaggtctcagaggtatgtcacctccttagagagagcctctcttccttgcctgataagtaaactgaggctcagagaggtccagtaacttgcatgaggctaccatgctagtaagtaacatatgtgtaatctgagccttgagggtgtgatgctacatcctgtgtcttgaccactattttatctgtctttactcacccataatagtggcaagagaacacagcacagtgcagggcttgctgggggccacacctgcagaagatacaaagaatggagagaagaaaaggagcagaagaaggaggaagtgaggccatagcccataacattttttggcagcagtagcagagcccagtaacagaacaattggatgttgaataaaatgaagagtgagccattaactcctcagtacagccaaggttaagatatcaggtcatgatccagagatgagaagatcaggcctgcaaaaccaacctgctgtcccagctagaaaagtattatttatttcctagggaactaaaataagaataaaaacccaacttgtacttgtgtccatgattagtatcttattcctgatttaacaactcacttgatattctcagtaatttattgcagcatgagtgttattctcaagtaagtcctttagttcactattactattaaaataaccgcaatggatattggttgaaatagaaatatctgaaaatggtggattgggattgagcaggagagaacgatggaaataataataagaagagtggacatcaactgtcctgttaggtcatttaggtgttccttttgggtacatctctacagcaatcttctggggagaaagaaagacaggaggcccctatgatggggccagggaagaggatagtaattacataagcacattgagacaccgatataatcttcagtgcatatactgactttaatactgtcttcccaaattcatgtccattcagaatctgtgaatgtgactttatttggaaatagggtctttgcagatgcaatcaagttaagatgaagtcattagggggaaccctagatccaacatgaatagagtccttaaagaaggagaaattggaaatagagagacacatacacagggagaatgctgggtgaagacagacagaggtgaagattggagtaatgcgtatacaagccaaggagcaccatagattgcagccaccaccagaagctggaagagacaaggaaggatcctgccctggaggcttcagagagaacgtgttcctgctgacactcatttcagacttctggcctccagaacagcgagagcataaatgcctgtttttataaagcaggcagtttgtggtcatttgttaaggcagccctatgatttaatacagcaaatctaaataattggctatcacagatgattactataagtaaaatttccgcagaattgctttttcttctgttgacatagcttatttttattttaaaaactagtttttaggaatctatatgaacagacagtacattcatatggttccgaaattaaaaacaaagcaggaaatgacatgaaaagacctcctccttccccggctcctgtttcccctcttcacagacatttttaaaattcatgtcttgtgtgttcttccaggagaatcatgtgcatctacaaacaattcaaggacatattcttcccgtgtttttaaaacacaaattatagcatatcatactctgctttgcaccttgctttttttccactcaagtatatatcctggtaaactttccacataagtctatgcagagcatcttgatacatttttacagctgtaaaactttccattgtatgattagaatgataatatatccagttggtcctctcatgaaggcaatttagatggcttccaatattttgctattatatacaaagctgcaagacgtcactttatatatataaatgcttcttgattcatgatggggctatgtcccggtaaaccatcataagtcaaaaaatcctaagtcagaccatggcaagtcagggatggtctgtgtgtcattttatgtatttgtgattatatatgtaggaaagaattccacaaaagtgaaatagaatcctaagggcatatgcatttgttgtttttaaaaatatattttattgtggtaaaatatacataacaaaatttgccattttaatgatttttaaatgtacagttcagtggtattaagtacattgatattgttgtgcaaccatcaccaacctccgtctccagaatattttcatcttccctaattgaaattctgtacccattaaacactaatttcccattccccagcacctatcagccataatgtgactatccatctctatgaatttgaccactctaggtatcttacgcaagtggaatcatacaatatattctttttctgtctggcttatttcactatgtaaatgtcttcaagcttcattcatgtaacatgtttcagaatttccttctttttaaaggctgaactatagtccattgtttgtatacacacattttgtttaaccattcatccatcgatagacatttgaatcatttccacctttcgattattgtgaataatgctgctgtgaacattagtgtacaaacatttgttctagtccatgctttcacttcttttggatatattcccagaagtggacttgctagatcgtatagtaattctatgcttaatttttagaagaatcagcatatggtttccacagtggctacaccattttacagtctcacaagcaatggtgggaactctgatttctctacatcctacatcctcaccaatacttgttaatttctgggttttctttttggataatagctatcttaatgggtgtgaagtggtatattatcttagtcatcttgagctgttataacaaatatattatagaaagagtgacttaaacaacaaacatttattgctttggttctggaggctgggaagtccaagatcaaggtgctagcatgtttggtgtctggtaaagacactcttcctggtttacagatggctcacttctctgtgtattctcacaaagcaaagaggagagagagagagagagagagagagaaagagagagagagcgagagagcgagctcatgcgtctatcctcatcaggacactagtcctattcatgagggctccaccctcatgacctaatcaccttccaaagttaccatctcttattatacactgaagttagtatttcaacatatgcattttctggggacacacattcagtccagaacaaatctcgtgattttgatttgcatttccctaatgattagtgattttgggcatctttttatttgcttatcagctatttgtatatcttatttggagtaattgctaaattaaagtcttttgcccattttttgatggagttgtttttttgttgctgagttccccatgattttctatatatttaatattacagtatttttgtgctatttttgatttaaaaatttatgacagatactatttttctgccttactttaaatataatttatccttttctttccaactcagagacacctcagttattctactactctgtaatatggggaaaactaagatgtcacccaatatccacctgttctattaagagatgtcctatctgttaagccaaaagttccatcttcttggtataaaattttcagctcatttacttaattaacagttaatttgatgcactgagcactactcttggggttgacaaaacaaaaatgaattagtagttgttactgtctctgcagaacttgcagatgaataaatgaatgatcataccagagtgcagtaacggttgtcctgggcaaacacagataatctctggcataatttaaatcaagaatgtcttgaactctattgcatgaatcagaagacttagaaaagtattaccctattggataatcattgatgaaaatcagaacaaaggccatgtgcaatctgttcatcccaaaatcatagccttcctatagacttcagctgcaaagtggtacagaaagtgtggcatgaatctcacaaagagaacattgatagaacagagactattatcgatctacttaaatttttctttagcatctagtgtatgccctatattgtgctaaggcaatggtagaaattgcttctgtgatctcctccctgtcagccccatagtaatgtccacctctgagggaaagactaacaaaagtatggcatgtagcaccaatggaagacatcactaactgatggtggcctttctcacttagtctagtagtagtttctgaacccacggctggaggagaacaataccaatcaatagagttggccttggaatttaaattcacttgcaattttggctgtcaagggtctctatgtataagaaattcagcagtctctcttaatgtctgctgctttgagaagaagaagaaagtttggggctccagggagtgaaatcagagaacatgctcctctttgggcctggatactggtgagtcaaggtcaccatctcttttgtctatcttcttaaatttataatttctctcttttttcatattgcatgttaagtaaaagattcaatgtgcttggttgaccctgaaaagaaagagttgttgggagcaggctttgatttgactgatatgttaactcatgtgtacatgtcctattcatcttcacatcctcagttcctgtaatagtctttaggacatagtaagggctcagagaacatgagctggatgaatgattgaagctataggacagtcttggatctactcacttggttaaataaaaatccaggtagactgcagctccaactatcaagtgaccaatacctaggcaagggagaaaactctcagatatgattcctacttgggagccattcattcattcattaacaaatgctgaacttgcatgtactctaaggtaggctgtaggtgctgggtccctaggggcaggcaagagcatgagcccctcctgcaaggaactttggtgaagtggagaagacatatcttggacacataaagagaaaattataaactgtgatagatattatagttggataaaaagagcgcaggaaggacatagtatagattgggtttaagcatccacaagtgaagagatggagtggagctttgaacttgttcattgccctgcagtctgtcagggtgcttctccctgacacatgtccctcagaggaaggaccctgcacctggtcatcagctgcttgagtggcatcagaggctctgagttcgtgcaatgcagtgctcctctctgtgagcacgtggtctgttacccaacacactccactgggcgagtcatagggagtcctttctaacattgttaaagtcttagctactgagacttcggttcaaaagaggcagtgaactaaatatttaggagagctcagaattgaaattgatggtcagagcctaagaagcctcctgcttcatagttataaaattgagtatagtttccaattcataaaaatatacactcaaaaagccttaataattttcatttgcttcttgcaaggtttacaaatggtttaactcaatttcagccctcagagcttggatttccagcaattccataaagatagagacctcattctattcattttaaagctttaatgtctttttttttttcattttataaaataataggctgtattccaaatcttgataaggccctggaattcttattctattccaatggatttccttcgctaagtgttttctctttattaatctctctctctctgcagaatacagaatttacacactaaagaaagttagaacctttcttctgtttactaacacaccccatgaagtatccagttaactctaggataagacaaagaagacttatcattgatgagaatcagaacaaaggccaatttagaatggtttagaatcattgttacaaataatgacattattagaaacgaagtgttaacatatgtgttagtaatacccctttgcatgagtatactatggatcccacagcagtcaacatttgcaccatcgaatctgcttgttacctacttttgctccctgatatctgatgtttgtggctcattcattgcttaattgactttgagtatatttcccaaatgttcttctcaatcttgtctttgcagcagaagggagaagctgtgtgtccctgggattctgggggctcaccaaagtccacaatggcttaccgaaagtacaacatttttgtgaaatctcgtgctttagctgaacattttgcctgcaatttgtgttctaatcatattcctacgtgttttaatacaaaatttctcttttcccctaaacctttaagtagcatcagtgccttggaatgctgtgtcaagtgcatggactctgcagttgtgtgtctgagattcctcagtatttggtgaatcattagcccagcagagcagcacagtatcaaaggaaggggtttagcagaggatttattgagtgttccatgcatgaagacgaggaccacagcctaatcctctcttcctgctcaggagcctagcaacctgttgccccgattgtggacacagttctagtcctacctccccccatgtggttcttcacttgtgtcctcacaaactaatggatgggagtaaatccatgagaaaaggaggctacctaagcctagctcagccaggatgctctgtttggttttttagtgtttattaggaaacatctgtttcctaatataaggcagcaaatgcagctttttaggtctccttccacatctccaaacgccctctctctcctgaggtttccttcatcaccccagcaagtgatggtctcttcccttcttcacttccaagtagcaaaagcaaaacaacaaagcaaacaaaaacaaaaacaaaaacaaaaaacaaagagaaagaattagatggaaaatgatggaatgagaaaatcattattttgcaactgctgctgtaactgagtcaggtgaagaccctgggaggagcagttgttgggaacgggctggttacatggtctcagagcgtcactccctccctatttgttaattacaagggaaaacatttcctctcagtggagaggtccaacacttagcccagccgtctatcgacatcaccatcatgggagaagctgacatcacgggctgcccactgtgatgcgagggggagggcatgccgtcaaatatttagcattctggcccaaagcccttaactggaatctaaggttagtgaggacacagtcagacaaatacagacttagcacattctacaaaatgactggcctggactcttaaaaaatatgttacaataaataaaccaacaaaacaaaaacataggcaaaggatctgttctaggtaaaaaacactaaagaacgatgaagattgaatacattgcatgatccttgagaaggtcttggaaaactgggacattggaatatagactgtgcatttggtaatattattgatcaatgttaaatttcctgggtgggataatgatattcaagttatataggaaaaatatcctttttcctagaagaaacatttgtgtaaaatgaaacataaaagtatcacaatgactgcaacttacttttgaatgatttggagactgagagaggaagaaagggagagagagcaagagagaagaaagggaaggaagggagaaagcaaatgtggaaatgtggaaaaatgttaacaactggtgaattgaggtcaagggtgcataggtgttgattgtaatcattgacttttttcagaggtttgaagtttttcaaatttttgcagaaaaaaattagcatagcaatatacctatctacgactcttgctgggcaatttcaatcttgtgctacagttacttatgggttctactgtccctaatttgtgggttgttcgcctaattaggataggatcctagctccctacattataaagcacctgcagaggttaatgcatggctcttcaaataataaataaatgccactcacatgaatgctgagaactaatattgcgtatccatacactggatggagaggtggaattccagccttgctggggcaatgaagtgggtcacttcctgctgaaaaggggaaggaattttaaccctcatgggtcacgaagaccttgtgagtcctccaagtttgcaagccccacatttaggaggccgcacttggccttgaaggcctgaccttcatctacacaagatggtggggtgttatcttttttgtgtcttgtgtgagggaactgcacaaatcaattggaaataatgcaatgataaggcttctataatagagaaggaataatgcacaaagcttcaggtgatacggtgtttaccaagttatgttttaaaaatacagggcatgagtgataggaatgaaatgcacatttaatttagagcaatcagaattttcaaaatcatatatttatttaaggttcaggagcattgcctggttttgtcattttcatttgatttgggaagcatggatttatcttataaaggggcttggtgctgtggtggaggggccctaaaccttcctatcaggacaatacagttttggggtttttactatcttctccatggtatactgtttttctgaacccatcctcgatggtgaaggagggatacagagttttttcactgaagggtcaggttgatcagggaagaggagtgcagagctgaaagaagtgaggctgggactttgtgcagcttggggttccttctaccctccatgggagacgtgtgaggatgcaggtcttgagaggaggctgtcacacgtggagtttcctcacgatgacctgtgctcctttcccaccctccccgcttacaggacagcctctttcaaggtcctgaattcactgaccccacgctccctcggaggcccctgagctcccctacaaggaccgagttagtcccttcgtgggttcccttcatgaatcttgatttctgagtgcctccaggctgggctggtggtggatagagactgtcactgccactgaggccccagggggaagggtgcaggcggttccacagtgagtgtgaaggagatgcctcacctccagttccatctcgcaagcagcctgatgggcagctgcctgcttcctgtcacctgcaaagcaggtacgccttgccagggtgagcactgtttcttctcggaggcaacacagtcagcctcacacaacgaagcgaaaagattctcactcctgctgcacggcattggtgtcaaccctcgcaaacaagccctgcgtcgttccctggagcttttggcatcttcccaggacgggcttcccttacaaatgcctcctcactggctgcagatgagcctgtctttgccacacagggaggaggacgctgctctaagacgattttacctccaaaccttccccagcaattagagcagtggcggtgatttccagttcagacacttcaatatattagaagttatcatagagtaagaccctcgccccacactcaatcctgtgcacgactctttgtctttgtttttctgttttggttccatgttgatgttttgactctactctgggcatggagagattctcctctcctccctgtttgcatgggccagtgggggaggggcaatgggcacgctgttttctctgtcattctgggtcccagtgattgaattatttgaatattttggcattatattattattttttgaacagggaacacatctgcatgattcaaaattgaaacaatataaaaggtgcacaacctcaatgtccaatctccgccctcatgccctgctcagcccaggaagctgcccccatacagtgcaccggccccgcttcttgggctttgtttagccagtgggagatgcagacagggcatggggttgagccagacgagggaacccagcgggttccataacctccccctcctgttccctctctgcctcaccattgttggtgtcagctacattctcacattcaccccattctctggggtggcctcctgggtgaatccccttctcatgggactccggtaactgtttctgttcctcaggcaagggggcgatgggaggaggatggggtgatggaaacggctttctgaagctgttagtccctggctgtttaacttcctctatggttctcttactcctgcttgcagacgtggtgtgtcatctctacactgacgggtattgattgggtatatcatctctacattcaactctccagttaaaccatctgagtggcctaacagtttgtagtcaggccctgtatgacacacttaccactctttatactttataggtaactgctggtactagtttttccttatgtaaacatgaaacttttgcatatatatattctttttctttttggtgacagggcctcactctgccgccaaggctgagtgcagtggcacactcgtggctcactgcagccttgacctcttgggctcaagtgatccttctacctcagcctcctgagtagccaggactaaaagggcacaacaccatgctcagttaatttttgtattttttgtagagacagggttttgccatgttgcctgggcttgcataagtattcttatttccccctttcttacatgaaagatagcacgcttttcactgaacaatatatcctgaaggtatattcctaatactgcataaagtgcctcacctttctttcctctctccctccttccttctctcccttctttttgatgtttgcatagtgttccattttgcaggttttctagagtttgctcaataagtcctctgttgatggacactttctccctttttattaaccaacatagacaatggcacaatgaacagatgtgtttcacttctgtgcaggcatacgtataatgtcaattcctagaagtggggaaatgcatttaaaatttttatcaatatttccaagggctcataatttgctgctgacatctctcctgcccctctgagctcatcttctgaactgccaagagagttccttcttagaacacttcaaagcaatccgtggcttcctgttacccaagccaccttcctagagagggataggtggtgtttttcactctctcattccaaattctcttcggcctcagcggctcctgcctcatctatgtaccatgccctctctccacagctgctggcagataacagaacactgggattgtcagttcttctgtatcttagctcgctgtggtcaccgagtctgcagtactcccttccccatcgctcatcctcatccttcaccccattcctcctatagctctagatgatgaaacacagtgtaacgttatgtattacacatattaaactatcgtgtaactctggatgacgctaagccccagctcacatgggtttccctgaccctcgcaggccatctggctgctccttagctgcctgtgttatgaagccacagcagatcgcactcacccatccacacataaattgtcctaaaaagtcatgagtctttaaggaaaacaattgaggcttactttcattttctagcaaggagcctggtacagagtggacgttctagaaattgatgttgtcattgcttatttgcttgtttttaaaatagtgcattttccatttcttgcctaacagttgtctaacctctttatttccagaagactagagaccaaagatataaacaaatgatctaatcaagttgagaaagatcacaaattggagtgaaaggccgagaagaaaaccggactcttgtgtcctccatctgtgtggagggcactgtgatgccctggggagcttgcgggtctgggtctcagtctggctccagactttgctgaattagggaagttttctgttctcatcagctctctgcgtacatggtcgtgtgtgtgttttgtcatctggagctgtaggtggcttgtcctctgctcagctaatgtgattccactaagtgggagagggagtctgtgatggggctgtggcatccccaaatctaccttcttgggggattcagtagcaggtgatttgggatttagagaggaaaataggtttggagagtggtaaggaaggagggagtgcaagagacgataacagtgtaggggaaggaagaggaagggaggaggagaaggagagaggtctgtggctgatgcggccgccactcatctggggtgtcatccacactttttgcgtttagcaactcaatttgagtgatgccacaacacaggaatatctagaatatgaggtttcctattaagggccaggctaaggtccaagaacatatttcattaatttacctgagaaagcattccttttcactggctaagagacttgtgctctattccggaagggaagtaaagatgaaaatcagatatgtgcttggggctgggcaccatggctcacatctgtaatcccagccctttggaaggccgaggcaggtggattgcttgaggctaggagtttgagaccagctcgggcaacacagtgaaacactgtttcatcagtagtctcagctacttgggaggctgaggtgggaggatcacgtgatcctaggaggttgaggcttcagtgagccatgatcatgccactgcactccagcctgggcaacagagtgagaccctatctcaaaaataagtacataaataaaaataaaaacatgtgcttggtgagcccagaatcaagcaaagcgaatttcatcatttcatccaatattctacctgggattgtctttgttatcttgagactttggtgtctgaggtaaaaaagactttggtgtctgtgggtttgggcgggtccattgactgtctctttactgaatatctaccatggatctggtcagtgcttggtgctggggacacagaggtggagcgagcacagtctcagggctggggtgtggtgtggaaggggaactgagatgtgttgactccactctgtggaggcttcctcagttctcccatgaagttgatgtttccagttccggttgattgcagggaaggagagtggggatcaggctggatgtggtggctcatgcctgtaatcccagcactttgggaggctgaggtgggtggatcacttgaggtcaggagttcgagaccagcctgactaacatggtgaaactccatctctactaaaaatacaaaaactagccgggcatggtggtggcacacacctgtaatcccagccacttgggagactgaggcaggagaatcgcttgagcctgggaggtggaggttgcagtgaaccaagatcctgccactgcattcccacctgggcaaaaagagtgagactccatctaaaaaaaaaaaaaaaaaaaagagagaaaaggaaaagaaaaaacaaaaaagagagtagggatgagagaggtcacacagctttctcaaagtcacgcagtccccaaagcccgggaagacctgtgagtctgactgactccgccctctccctcttcatgaggatgcctttgggaccaacagttgtgtgggataaggcctgggatggtctctaacccaggagacaccctcagtatggtgctgggtctgtggagatatgagcgcttgggaaaaggctgtagcccttgcttctctgaggatgtagtggtggcgatggaggaggaggaggaggagaggacatttgaggacaggaggaccaggcctgggatgatctctaacccaggagacaccctcagtctggtgctgggtctgtggagttatgagcgcttgggaaaaggctgtagcccttgcttctctgaggatgtagtggtggcgatggaggagggggaggaggagaggacatttgaggacaggaggaccaggccagggatgggatccacactgagggcaccactcacgtacacagaggccctggtctgtttagaactcttgtcccctccttctgaggaatgagcatctttgacaatagtgcgttggtgctgtcttttgcttcaacatttgcaaaacttgctcctcaaccccttggcctgcaaggttggagtcctgaggagtttttggttctgttactatgaactgtgtttgtgggcccgtggaggagctgaaagctcaacctacactggggtctttcaaatgaattttcttttcctttctgtatttgacccaggttttaatttattcatggcagatgacctcacagcatgttgcccatctggcagagctaccttggagcaattttaatccgcggagcttaaagccttttgatctccctcatactttccattctcagaggctgagtaattcaagtaagacgtaccagttcaattttcctcccagggaaagaaaggaaatgacctttctggaaaaaagtaggagaatatctcagagggaggttttggggagaaaaaaatcacaaggttacaaataactcaacaagggcagtagaaaatcattgtcctccaccacaaagctctgccaacatgatgactgtaaagtcacgatggcaagagaaccctttctttccccttcctgggaacaattttatttgacctctagacactttttgcgagtggcaaaaatccatctggacttagaggtgagcagcagaagctatttccacctgcattcggaaagccaagctctatggggacagggcaggagcaagctgagaaagacattcctgtgtagagttccaaagtcttccaaaaatgaccaagaccaaccaagagcctgcggacaccttccccttctgcgggggtctgatgcccttcctttcaaagatgttaataattcagtccacagatgggccgctgtcttatgcgaaataacttgcactccttaaatccagagcagcggcaggcaggtgttgggtgtggctgcccttgcacccaagttttccaaaataagaagagaagagtgttggcaaaggtatattttttatcttcaccccttttctcaacttcaagaaataattattgaggccttttaaaaacacattaattcccttgtctgaatagagattgaaatttgttaactgataattaatgtctctttaccttttaattaaaagttaactgctagtggaaagtgccaaggatactccttgggctgtgcccaggccgttcgtgcactctgtgttttgctggcctgctggggctcagaactggaggcagtggagggtctcagggtggtgtatgtatgcatgggacaggttagggactggtggagcttgaaataaaagccatttcttttatgtaaaattcacggtaaggctgaaacagttaaatatgaataccaccccaaagtcaaccaccctgccaattaccaatccctgtccgccacctcctgcttgctggagaccaaggctttgtgttgtctttgggggacgatggctgagaatcgctttctccagtgtcttctgtaagcagaagactgcttggccaccagctctaccgctccattgggatgatgcctccttttgtccttcctattgtcacttaaccacctttctttgaactgtcacagatggtgcttaattaaaatttcccccaaggatactttcttagcactatcgtttctaccttagttaatgccatgtgctatattctgtccaaagttgaggtggggtggggataccgtgctcttaggtagaagttattttttcattgtattcattgcatagtctgagtttaatttgcatccctgtaggattcatatttattgagcacttactatgtgctagagcccttgagtgttatgtgagccatatgaaataagatattcaactgtttgtcctacagatccagacatttcatatggctcaatctaacatctgatttcacttaatccttacaataagtctatgggagaggtgccattgaattcattttttggatggtgaggagccgtggtccatggatgtgaaggtatttctaaggctgcatggttaggaggccggcagaggccattgtctgatgctaaatcgcttgtactcttttgtatcttgctctgggtctcaggaccctcactgtgaatttcaaaaggcttggactaaaacccagtgcttttcaataagatgcagtcttgttctctgaggaggcatgtgacataaaggtgggtggtttagtgtcatgaagactggggaggagaccctttggcttatagtaggtggggtagagggtagaagccccctgcagtgtgagtcagactgactgatgaccaagcattttgctccaaatgccttttgcttcctgtttagaaacatgggcccacatgaaccccacatttcttcagacagtggaatccaatcactcagccttcaataaatcccaacagacgagggcggtactttgcttcgatggctgcctggtgggatgacctgccccttttgggaacatgctggccccgcccggcttaggactggctcctgggccatgattctgttgtgtgctcacatcccccaggtggggatgatccagccgtgggtgggcacctggcctagctgggctgtgggaaatctgaccacgtgcacacatgggccctaccacatgtgaactcaggggctgtggatggtcatcgtctacctaccctgtggccttgagggactgagaaggccagtttgcaaagagagagggtggaagctcaccattgattcctcctggtttcccaggggccttcctcgtgggtcacctgacttcctgtccttggcttccatgaaccagccctgtctccttgcaacccctcctcctctttggcttaagcctgttgggaatgtttgctgttttttgaaactagaataagcctaagcaagataactctatcaggtctacccttgcacgagtataagagaaatgtggaaaatgaaccacacttcagagcccctttagaagataaaaagtgaaacttaatgcaaatgtgaagatgctcatcttagactccacaggagattaatatttttagagtagaaaactttagctgtcattgttcaagatgaattttccataattatgaaggcaaattatctgtgaatctggaagctatcattatttaaaacaagttcaatcagacaatttcctggtttcccaaattttacgatttttttcttgcaacccttttttgaaattggtcttgtcatttgtcttgaaatgcaaacaatatttacctgttgtgcagctagttttaataaaatggaaatgcatcatcagaactgaaattcattttgaagtaagaacctgggtgctttcttacttaatagttatgtattagataactattacctatgaatgcttgtcaattttgtgtatttttcttgggcaagaagagcagctattttccttgtatgcagattgtcatagcttaaatgttccagcttaattatctccaaggctttatctttggaaaagtcactgaactacttggaaataatggtttcagcatcgactaataaaattatacatgaaaaaatttatcttctgatgctgaaaggaatcatgacagcatcagacatttactctactcttcttttatttttataattgtaagtattagatcccatcatcttgaaaaagtaatacacttaatttatgaggaaacaaatggactgagtctgttgcacaatgagaaccagatgctcaactcctcaaacaagtaggaaaattctttgagatttgagaatttcctgaaatatttttgccagagttgactttcaaggtgaatcatccatagtcagataactcggagcgcttggcaaccatagcccggcccctgcagagccctgctgtacctcgggtctcggtctcagctcttcatatctcgatccacttcattcattcagtcatttgctcacacctctgggggccgagggaagggtttgttcagtcgagtcagatttcttgtggtccaaagcctcatgttggcagtgtatatgtgtgtgtctgtatgtgtgtgcctgtgtgtgtgtgtatgtgtgtggggcgtgtgtgtgtgtgggggcatgtgtgtgtgtgtgtgtgtgtgtgtgtgtgtgagagagagagagttggaaggcaggggaatggattggttgggaagtagtctgtgctggcagctctgtgtgcccagacaccccgatacatccatgtctatgcaaagaccatctctcaagcaccaggccttttagcggctgctatggtagcctcactctttcatttctgagttgtggggcttgggcactgtgctccccacacgtgtccatgtgctgatcactggaacctgaggatgtggggccttacatggtgaaaagggactatggaggcatgattaagttagggattttgtgatgagaagattttctgaattatctcggtgggcccactgtagttacaagggtccttaagatggaagaggggacaggagggtgagagaaggggatgagacagccgaggcagatgtgggagtgacaccgggcacaaacccaggaaagaccagggacatagattctctcctgcaacctccacaaggaatgcagtccccctgacacattttaggctgttgacatctggaactaagagatatgggatttgtgttgttttaaggcacgaagtttgcagtgaattgttacagcagcaatgagaaatcaatacagacagtccactaaacctcagctcattttgtatttaaaaatggggctaattatgcccacatcatgatgggatgaagtgttgtaaggcttgcgaacatgctttagaaactgaaacaacatacttggcagtggaaacttttatcgtgtgatcttgtgatctttctttgatgccaaggggccatcaggtatagccctggagccaaatcatggggcattgatcacttgatttgtgttttttgtgccaatgccatcccattgttcagtggggcttactgtatgttcaaacagccagcagccaaggacaagggcaaacacacacacacaaagatgacagaggctgagacaggctggccaggcagaatcgcactgtggggagctgaggctttggagcagactgcctggacctgcagctcagcctccagctgccagccctggctgtgggcagtgctttccagttgccagccttggtttcctgaataagaagtgctgagtacagtggctgctccataggaattgacaattgttattacccaccctgcatacatcccctgctccagggcacgacctgtcattcccaccctggtccaaggttttcagcacccgccttctcccagttctgctgagcttgaggctgtggaggtggctggctggtgggggacggaacagggccaccagcttctccaggggaaaggctatcctcttagtgcgcattgcagatgtgaaaaagaaatgccatcttcccaaataaaattaaatacaacccagaggccccaggactgaccctggaaggagaattaagctttctttccttttccagaggactccgtcttcccttgaggtctctgtctggaacccagctgcccgtgtgggcctttgggtacatcgttccctctctgccatctgtagaaaaaaatcatcctttcctgcaatctctgctgctttggcaggaaattcatgtgcaaaagacatctaaaatggctggatggcatcacaaggggaatcaacccagaaggaacaggatcctaaacatttgcatctcaagagagggctggcagcggaggctcgcagggcctgtcctgtttcccgtggagtttgacctcatctattctggctgttagactgtgatgaagatgcagacactccaggattcagcagcctggggcttaaaaaataatgtcacgctcccttgcaatgatcggttttggtcacttcatccctcttggcctcggggctggaaatgaacagctgtccaagagacctccaggaatccctgggagtctcagaagggtggctcctgggctcatgcatgagtgagttcttgtgtctcttctctctttcctctctggctctggctcattcttatccacagctgctgcctgccagtcatgtgccacaggttcaccatggccaactgccaccatgaaaagcagcatccaagctgaggagctctcttgggatgtgctcagggaatcagaccctccaggtgctgcctccttcccttggcaggaacagaccctgctctggttctgagctactctctgccaggcagctcccaaagcagcactgctctgcattcagccttgctacgtctccttcagatgggcgcactagatactgagtgatgatcatgccttgtctaggatctcaccaagacagttcatgaaagagacagtgcagctcatggaggagatggtgcagctcacagagaggatggtgccatcatggaaagcatggggcagtcatggagatgacggagtagctcatggagaagataatgccatcatggaaggcatagtgcagtcatggagatgatggtgcagctcatggagaagatggtgccatcatgaaaggcatggtgcaatcatggagtagacagtgcagctgggccaagattctccctgactaagctcttctcaggcacctctgagccgtcgtcttaactaggcctccagcttggcttgtgaaaactgcagactctcagcacaaatgatttgcctcctacattaagagacttaaataaacacttgcatggctgtgtttatttaaacagctcaaggctgtgtccctgggatgacaatgactccagcccctaaaattcctgcttgtgaaagctcattgctgacagaaggatctaccatttgttccagccaacacctggtggcaggcagataggccctgagccccatttaagagcagttcctttagaaagcttgcaattgtaaatcttttctctgcccatttgagatgtaaatcttctaccacctagaactgtcttctcaaggacctgtgagctgactcactgaaatgcaaacattcagggagataactccactcctgtccccatgcgatggcgaggccctgactttggtgggcaccttgctcttatttgcaccaccacctcctgtcctaaagacatgagacgtttgtctctcctctggataagtgcctattaaccaacccaggtgtcctggtcacatgaaccagtccagcctagcacctggcactgcctttccctcagcacactccagtctgtaaaagtctccttatggttgttttggcaaagttgagcttagttaatgctagaccccttctctactgcaatagttactgctgaataaagtctatccttaccactttaactagtgttgggctttgtttctctttcataagctcatggagaagacaatgcagttccatcaagtttctggctcttacactgctaacagtcagctctggggtccctgagagggacagactcacaccacccgcttcatccaggtgccgtcaacgttcctggttcctctttggttcctcctcactgcaagaagtctcactccacctgaagcctcaaatcagagccccttcacatgcggatacggtgaacagatcttagccatcgtgggatcaggagctcaggagtttgagatcagacttgacaacatagtgagaccttatctcactatgttcctgaagtcagggactagggatccagtcttttgttatctccttgtttcccatgcttctgggtccagagagagagagattcccttttgtctgttttgggaatatacagtctgggtttcctgacttcctgggcgagtgaccccagagctatcctggcacaatacgataaccatcccccagagagacaggatggctccagccacagatgggtgactcatccctggcaggtgtccccgggccagggcttgggcagccagtaccagtgcccgtggatcccctccccaccgccattaacttactagttcagcccagctttctcccgtaagaattctccatgcctagtaggacgatccagggcgtcataagatgcagctcttcttcttcagactgaggcccctgattaccttacttctctccctcgctgtgcaacctggtctcctgcctcgcaggtgctgacctagctgtctcttcctaactcctctaatctgatgcatgatttgcttactcacaatctaatatcttttctgtaacttgtctctgggcctctttccctcttctgcactcagtgattcttggggagaccttttgggtaatctcccctgactcttctcctctatgtctttttttcttttcttttgtttttttcttcttctttttttttttttttttgttgagacagggtctttctgcgtagcccaggctggagtgcagtggcatgatcatggctcactgcagccttgacctcccgggctcaagagctcctcccgcctcagcctcctgagtagctgagactgcaggtgtgcgccaccgcaccctgctaatttttttaaatttttagtagagataaggtctcactatgttgcccaggttggtctcaaactcctgagctcaaatgatcctcctgccttagcctcccaaagcgctggatttacgggcatgcgccactacacccagccttgtttctatgtcttgaccccactctcccatcagtctcttcttgtccctggttctctcaatgcaaattttccacacaaagagtgcactcaccttccacagcctctcctccctctccactacagaacccttcccttctcccaaagtgaatgtcccttcctgcagctatttatccatctctggtcctctggactggtattcttgaatgtttctgccccactcctatggtagttctagttttttatgaagtttcaggtattttttctgtgaccctagagatcagggatgccaggacctcaaagaatgatatgtccctatggacaatatgaaaggcattacaattactgttaaaggatatgtgtttaatgcagagtggacagtgagcttgtccacacccgaatgtcttgggtagggatgatgctatagatgacattctggcttttggaatattcaggccaaagtagggtcattgaattaaatgttgtaaccccgaatatctttggatgaaattcacaggaacgtggttgcaaaagctattttttagaagagaaataaaagtggttttttttggccaatttctctttacgatgaaaatgcttttgccttttgggatccaaatatatgctggcatttatgcatttttcagcttcgttctccacagctgtgccttggttgaaacagctcatgcatgtggctggtaaccctggcgccgccctggtggaaaccttgccacacagtaggacttgtaggtccccacctcgctgcagcttaattagggaattacatttttctgaagacttttggttgactgaatttaatagactgaggagttttttaatgttattatattggtaataagttcttcagtatgatttaatatttgaaattatttaaagcaaggattcatattaacaggaatgaacttatcaccttttatgctaatgttttacggtcttgaaataactgaaatgatatgaatcttttgcaggacatcaattctggatatcgtttttgctttcatttggaaagatgttggcatagtttcacagtattttattgacgaaagcattaagtctacataggagtaactattaatagttcttcttttgtgacccatttgaatgctgtacaatttcacccagtagccactgggagtgtactgtggtgggtttactttacatctacccctttctctagcttccacccataacacacaaacataggcacacacgtacacacttttgtcttgtttgattgtctgacataattcttaatacaggaaaatgaccatttttgagtatggaagacaaatggtttctaccatattgatatatccaaggtggtgggggaaaaccatgatgaaacttttttttttttcccccagagacagggtctcattctgtcacccaggctggagtgcatctgctctatgtccaggatcatagagcagaggcataggagggagggtctagtaattacatcttctttgcctttagtttctatgaaataaatggattgtggtttttacctttttttttttttgcatgcctagtaattttggatgccagatgtgaatttcatattttggggtactaaattttatcatattcccttaaagagtgttggattacttacttttcttgcatgcaactaagtaacctttggacaagtctgattctgctgaggtttgatctgaggctttgtcatggtgagtcaaagactacgttaattctaataagaagacgggtggagcctctaccccatgcctgagtgttttgaggttgcttctttttggctggtgggaagatgagtgattccaattccatgggagctctgggaattattcatggagctttttcttgagcttggatggtttccttcattttggcttcagggaattttctcgcacagatcggtattcaaagactcaaggaaatgctctgaagacctctgcagctctctctctgcagctcccttctttttgctattgagtcttgcaaaattagtctccctggtgtcccctggtggaggtgatgacctcattgccttttccagatttacatggtatacccactctagtatgcctctgtcatacctctgttgacatagagtgggcccgtgttccaggtgatgctactcagtgtcctgtatcagtgggtcacacacggagcctcaggtggtgctgctgcatttggatcgatagaggcttgtggattggaaaggaaacgcacactagaatatgtgtcaattccagtcaaggtggattattgcctcttctggggtagaaggactttaatgacctcaatttgaaaccaaaagctggtctccttgaaagctggtgccatgtcaggggctcagaccttctgatcctccttcctggctgtgaaaggaagggaggtattttccaggtcactgaccacataccatgtacctggagccatgttgctctcctctagcaaagatgcagcagatgcagttggggctgccactcgactgagtttgaagcactccactgacatccttcaggctgtctggtttctgtagagcccacactggtgaattaaatgaagatggggttcatcaccaccccagcttcttgtgggtatgtaagagtgaccttaatctctgccatttcattgggatgtgatattactttttatttattattttggctggagcaaggacagttcagagcttctacttagccttcccaactaagaacactcttatgccacaagccatgagtctaatatggatgttctgtcaactgtccaatacatctatttccagtccatccactttgtacctgtgccaggatcccatctatactcgacccctggatgccccttctctaacaggaaggccaacgctttggatccccctttccacttggattctacagttaaaaatcttcaagatgtttgagtgttctccttccctggtgcattgttactcaaggagatgtctatgggtccttttgaggaagaactaggaaaattactactgcatacagtaggcttgatgttggtagatcctttctcctggggacttggctttctgtcaattgcttctggatctgaaaactggttcagatctaaaaatagagcaaggaatcttgacttcttattgagatgttggctctcagccccttgattgtccatctttggtttcttgtatagatttatagatctttgtataggtgtgtttgtatagctcaggttttctcaatcttggcaccattaacattttgagccagatcattctttgctgtcaggggcagtcctgaatactgtaggtgtagtagtccattctcatgctgctataaagaaatactcgagactgatattttataaagaaaagaggcttaattgactcacagttctggatgagttgggaggcctcaggaaacttacaatcatggcagaaggcacctcttcacagggtggcaggagagagaatgagtgccaagcaaagagggaaaagccccttataaaaccatcagatctcatgagcactcactcactatcacaagaacagcatgggggtaactgcccccaagattcaactacctcccaccaggtccttcccatgacatgtgggaattaggggaactacaattcaaaataagatttgggtggggaaacagccaaactataccatgcctcccctggtccctcccaagtcttatgtccttacatttcaaaacacaatgatgcctttccaacagttccccagagtcttaactcattccagcattaacccaaaagaccaagtccaaagtctcatctgagacaaggcaagtaccttctgcttatgagcctgtaaaatcaaaagcaagttagttacttcctagatacaatggaggcacaggcactgggtaaatatacctgttccaaattggagaaattggctaaaacaaaggggctacaggtcccatgcaagtctgaaatccaatagagcagtcattaaagtttaaagttccaaaataatctcctttgactccatgtgtcacatccaggtcacctcgttgcaggaggtggactcccacagccttgggcagctccactcctgtggctttgtggggtacagaacttcctcccagttgctttcacagactggggttgagtgtctgcagcttttccaagtgcacagtgcaagctgctggtggatctactattctggggtctggaggacagtggctctcttctcacagctccaccaggcagtgccctgtgaggactctgtgtgtgggctctggccccacattgcctttccacactgccatagcagagattctccatgaggactctgcccctgcagcagatttctgtctggacatccaggtgtttccatacatcctctgaaatctaggtggaggttcccaaacctcagttcttgtcttctgtgtacctgcatgacagacaccaagtggaagctgccaaggctgggggcttgtgcctctgaagcaatgactcgagctctaccttggccccttttagacatggctggagcaaccggtatacaagacaccaagtctcgaggctgcacacagcagggggcggccctggacccagctcaagaaaccatttttccctcctaggcctctgggtctgtgatgggaggggctgctgtgagggtctctgatatgccctggagacattttccccattgtcttggcaattaacatttggcttctaattatttatgcaaatttctgcagccagcttgaatttctctccagaaactgggtttttcttttctattacatcaccagtctgcaaattttccaaacttttttgctttgtttcttcttgaatgctttgccgcttagaatttttttctgccaaataccctaaatcatctctcaagttcgaagttccacagatctctagggtaggggtaaaatgctgccagtctctttgctaaagcatgacaagagttaccttaactccagttcccaacaagttcctcatctccatctgagaccctcagcctggacttcattgtccatatcgctaccagcattttggtcaaagccattcaacaagtctctaggaagttccaaatgttcccacattttcctatcttcttctgagcccttcaaactctttcaaactctgcctgttacccagttccaaagttgcttccacgttttcaggtatccttatagcagcactccactcctggtaccaatttactgtattagtccgttttcacactgctatgaagaaatatatccaagactgggtattttaaaagaaaagaggtttaattgatttgtagttctgcatggctggggagtcctcaggaaacttacaatcatggtgaaggcacctcttcacagggcagcaggagagagaatgagtgccaagcaaagggggaaaagccccttataaaaccatcagatctcatgagaactcattcactatcctgagaacagcataggggtaactactcccaagattcaactacctcccactgggtccctcccatgacatgtgggaattatgggaactacaattcaagataagatttgggtgggggcatagccaaagcatatcagcaggatatttagcagcatcccagctctctacacgctggatatcatttacgtcctcttagttcagatggtaataactgaaaatattttccctcagctgtgacaacaaaaatgtctccagacattgccagtgcctccctagggagagaagaggaaatgccctgctcctcctttgggaaccacaagggtagattgagggctttacttgttggctgccctctgtcttgttggtatgggtgctgtgttctattaacatctattaccatagcttggtgtaaggccagcctgctgcctgcccttttatgattattgcacccaccttgcttttgatgggtgattgttgccacccagcctctattatttctagatcctgccatgcctgttgctatcagggagcctggttctgtagtggcttcccctatgcccagtcctgtcctgcagatgatggacaccactgtgttactcattacttttgaggtccctctattagcacgtcccttgttgctttggtaaaggcaatgccctcatcgcacttttccagactttcatggtgtatccactgtggcatgctctcaactctaggcccttggttcccacatccacttgttgccatggcgggtctggcattttggcctcagtcaatatgggcaccatcttcttcaatgttccaaaagccaccctagcagcttttaggtatcttctcctgaggtctttcctaaagtgttaagtcctgtatcatcagatagttttcctgtatcaatgaactttctcttgcccaacttcattttctgctcctgctcctgctcctgctagtgccttcctgccttgatctgatgcttaattccagtcttctacacattctttgtacatgttggccaagtcctgaaggtcctttggggagagccctttcctccactatcaggcttagaactcttccccacaagcttatgggtgattctagcttagtcatgagtttgttgggcatgagggaaggtgagaattctcttgggataggtgtgtattatcctaccagacagagactctgcatcatcttcaagcaccaggggcactagccttcgacagggagaaggccaatcttgcaagcccagaggcatcagagggatctgggaatttgagatcttcaagcacacccacccatgactcagcatccatttctgtttcaatcaggccctgaccttggcccagcacacctgctgacactgaggatttagatttgtgtggtgttctgctaggctcatgataaggcttgggcctttcttcaggttcctctgcctgcagcccacaggaaataagagtcttctttacttttataaaataagccagagcttccaaaatgggcctgggtttcatacttagccttgagttcctaatgaatcacccccagccttgctttatttctgtctatagccttgatttccgcagcagcagctaaatgatttcattgtctttataactaccctttcccccatatttcttggctatctgactcagccacgtcatggttcccacatcgtgcatgctttccacaggtatagcaccccacttccccagggtgagcgccctaacacctgcacactgctgcacttcagtggggctccatgctgcacctgcacgctgcactgagggtccacactttcagctggctggcaggtgatccagatccaagccctgtgccaaggtctgctttcctcccactgctcctgatgtgactgtcaggtcagtttcctggaagctgcctctaaggtggagatgagaatgcagggtgatactgagccatgccttgtaatgatactgtgtggcagtgaatggggcaggatggggcagagacagaactcaggccatgattgaggcagagcaatgcctccgtggatcctacaacaagctttggagatggaatggaagattctgcagagttgttccaaattgggaccagggggccaggccttttttggatatgttctgccccctgcatagctccctttggctgacagcaatctctttaggggctcagaattgagagttgggtccatcaccaacactctcagcaggtgggacaatgagtacttcagtccccagagggtgggggattggggtggtccactatggagtccagcacagaaaccaactttagctcttggtcagaggtcttagtcacctcaggatgccttaaaagaataccacagtcgggagggtcagcaacagaaaattacattctaacagttctggacgctggaaatccaaggtcaaggtgccagggctggctccttctgagatctctccccttggctttttctccctgtgtctccacagggccgtccccctgtgcatgtctgtgtctcaagctcttcttcttataaggacaccagtcataatagattagggtccaacacttatatacctcattgaaccttaaacctcattagaggccctatctccacatgcagctgtgttggggggcgggccttcagcatatgaattttgcagggacacgatctggtctgtagctgtagacgagcaggctggttctgcagaaagaatcatggatctgaaattttgggaacaattactgaaaagtgaattggaggagttcacctgtgtggagagtggagacagggaaaataattaaggactcaaccaagcccaattctgaaagctgtcaggctgctgagaatcgagaggtcctttcagccagcccacagtgcggccttcagagctgcagtggcacttcgaagacaaacacccactgaccttttcatcaaagagaggggctgcagaggtgacacgcaggctctgcaggccaggcagccagtcctcatcggcaggacaggcttgggcatttaattgggctgaaaggaactatgagttataaaatgacctttccatccatacatagggaataatttaagccttaagaataggagcggcttcagttatgttcgtagcacttggaattagaaggtgtgacaagacagagatccgtaggagcatcacgaatggattttacctgtccctgtatgtctcccatattcttcctttctctcctgttggctggtgccttttggaagagtcacttcacctaggtgtgaagatgggatggaaggttgcatgcataaaacccaaattatttcagattagagggagacatagagggtaaaggaaagagagagagagagagaaagaaaatacaagttatgcataccaggttctcaataacttcaagaaataaaaaaacatacacacctactatacagagtggctaattaagagtgaccagtagtgtggagaagatatggggtatgatgtagaggcataatgatgtttgtgcaatattagttgctaaaatcctggaagaccatagccaaatatttctgttaattattattttttcttcagaaaggcagtaaaacccaattatctaggtttaaaacaggtgtgttttgtgggaagattttttaacattttagaaaactggactaaaatttgacagccgattttaaaatacccttttttctcattttcaaaagagaaaattcttacctgttggcatgggaaagagaatttaatttcacagaacaaaagagctttctttcctacagcaacattcacacttagtgaccgctgggtatttatttattcagaagtggtttcaggtgccgactcagtgctgggcatcatgccaggcatggcaatgaaaaaataagcggggtgatgtggcctggcctctccctctctcaagaggcttaaagtccagaaggtgggagacaaggcttgagtaaacaagcacacatactcatgcatccttacaacaagtacatccttccaggaggggtttaaagaattaggctgcatgtccatatctgtggatagaacctgcatagcctcccggctcggggccacatcacatccagtggttggcagcaggctagagtctgcaggaagattcaagctcagggcagcagggaaggaggtgaggagtcaaagacaggagcccctgggttcacccatcgggccagggatgctgaggctccccatgtagacacccagagtgtatagttggcatcgggctgggaagcagtgaaggtagaagaagggagcctcgccatgaaggccaggctgtgcagtctccgttccaaggaggatgaccaccttcttcatctgtgctggattaaaacagcgctatgtctgcaaaggcaaggaaatgaagcagaaggtaggttctttttcaaagtcccccacacctccagaaactatacacaaatgatgcatttggtatgcaagtctgatgaaaagccctaggtcattaatatatagtgtccctataaataatctcaaagacagcttgggccaactctgccccttcaggcaggatcatgcttctaagaagatgaaaataatctgtccttattatatatatacatttccataaattatagaaccacatgtctgtattttaattcagccaggctgaagttttccccaagatctaatatacgaagctgtagatctaattcttctgaagttccttcaaaatttatttcccagctcaatatatttcatgtagatatttttgcttaggttggcagatgcaaggcttgaatacttgtatattaccagtggagaaaatcagacactgagcaatggaacaacttcgccaaggtcatacagaaaatgatttctcacatctaggatccaagttctaagcttctggttcagaaccccattggtcacgtaagagtgtttggctaacctgagaaaagtcgaatgatggggcacgttgaagctattgacatacatgtgtaaaagtaaaccacagccaagcgggcctgaaaaggaggtggaaagggagagagtatcactgtgtcaagcagcacgtctcaaacctgactgctcatcggaaccacaggaaaaggttgaaagattgctcattgactgtccttgtccctggatatgctatgaagaggtccaggtagtctttggcgttcttgatctggtaactggtcttattggggtagtactgtcccacgaggatgaatgggaggagatgtcgtcccagggcccatctgtgggagaggatgcaatgtgtgttcaggctggggtgcctcttgacagctagcatgcttgcatttgagacctggtgggttgcacactcagacctgtcttgtgtcactggcgagcaccgatttcccagggcagcttgaccctccctttgtagcaatactgaacgttcattttgtgttctctataacaggacaactccacgactcattaacaggagatagttattttgctaaagatatcctggggaaataagtaggatgaaattgcataccacaaggccttgagaaaaatcccccttaaggtaattctatcctttccctgaaatttctctgtgtgcttgtgatggcatctgtgttcgtttcctgtggctaccagaatcaagtaccaagactgcgtggcttaagcaaccaaaatgtatcccctggcagttctggaggctgaaagtgtgaggtcaaggggcagcacggttggttcctctgagacctctctcctttgcttgtagatgccatcttctccctgtatcctcacagcgttgtccctctgcgagtgcctgtgccctaatctattcttcttataaggacaccagtctattggattcgggcccaccctagtgaccttgttttaacttaatcacctctttaaagaccttttctccaaataaggtcacattttgagatattgagggttaggacttgaatgtatgaattctggaggaaggcaatcagctcagaccataacccattctccccaatagtcttcatagtcccttggttggtcccaaagaattgctgagtctacccagcaaagcctcagcccagccctgcacctccaatcctgcccctctacttggagcctcagcactaattgctgtgctgccaacctcaggctgctgcagcccttgatgtgtctttgtgttgttagaaaatgcaggtctgctccagagccagccagcagagcacaggctgattctccacatgccctctgcacagcctggaggaccacagcagggaccccatggaggctcacactgggagaccccttctacacctccaggctgtgggggtccagcccccaacagggcaggaggcccctggggagggtgtggtttttgcccctgagaaatcacaggtgtctcctagtatagataagcaagcacccttcttccaatctgtcaatctgtcctacatcgcagatgacactatggctccagttcctcaccctgccctcctcctccttctctcccactactaaccacctgggcaaccctaaaggcatcccacgtgggccttcccaagcgtggcattgggggcaaggaggaggaggggagtgagagaaggaggatgctgtcttcattagtttgcaaatgatttgtgtggtcaggatatgtaaataaataatttatatacatataaaagaaacgaatataacacacatattttatataatatatataatgttcatttctgtcgctctgtgaaatataggttattttataataactcatgtatgagactctgtcttgctggctggtgttcccacgctgtgggcgagggtgctgaccagctggtgctcctggccaaggcctctgagggcagcctgtgctcgccggtgcccatttgggggcgcatggccttctgcttgctgtccaaggtggacctgaggatgtggtcgcatcggtgacctgggcatgtaaggagggcagtccaggtcagagggcgtggggctgctgagctgaggagagagggttgatgggctggagtctggtggcctgctctgcacagggagatgaggggtgctggggacgggtggcaagacgcttcaatcttctcgccagaccctctcagtcctgtaccgggactggcagagtaacagatgtgaatgtgccttcagtctgcacaacgcttttttgggacagttgagggcccactctgatgccttgaagactcttcagagcctcacgatgttgggactgaacaaaggatggaacctcttcccggaaaagctgaacaggactaaggcaaggagaccttcaaccaggccagggccaatgcccaggctccttcctggccccactgtggttgtgaggagggcacatcagcaaggctgctggagccgctcgcctcctttgttgaggtcgtggggacccattcccatgtcccagtccatctactcttatccttccagctcagggtacaagcagggcgacagatatgggataggggagagacagcagagatattaaagtccttgggctgagttttgtgttataaagggcaagggaaacacagctcctgggaaaacctgaaagtgcgtgagcgggcacgcaggtattttcagagctcctcttcccttagaaaaacaatccttcccattgacatttgaaaggtattttacatgcatgtaaatcttgcactcattgaaaaacgcacaatggcatccctgtgatgatctttgaaactttagcttttactttttactttttttttttttttaaaagagacagggtctcgttctgctgcccaggctggagtgtattactttttaaagaaatcgagcatttccttccatcctggcggaatttggagcagcgacctaacgtgccgttctcttttgcaccactaggtggcccctggtgctctcagatgtcggccaggcttgcagacaggtgaatgcatctcattggctccagggaggcatgatgccaccgggcagctctttttaagagaaaagccagaaccggtggagcagcgacccctgagcagtgttctctgtgctgagcggcgggactgagctgttgagttagagccaacatgagtgaggtgagtgatgcttcgacctggagagggaaacttaggagtgagaagggacctcggctgaaggattagtctcaggaaatgtgagggacttagcagtgctgaggaacaaattaatcctgtaattatttgcttggagaactgacaggattaatctcttggtttgaatggtaagtgcagaaattggttaagtttgcaacttctacaattagcctgaggaggagaaaggtttgctttctgattgaatggtgactttgaaaagtgctttgggttttagagctcagaagagaaagccaaatgttttattctcttacgaagatgcgtgtctttgcatgattcccgcggtgatacctttcagaatgtgagtgggcaggtggtcatctggtgaatgcaagccatggaagggaaggggacaaggtggggaaagggctggccgttgggtggcatttcatggctcagttgtacaaactacctctgcagttaatcagagcaccagggaaagaaatgcaaaaagtagtaggaactgggaaacatccgtgtgtatagatctgtggctctaagaccggaggcggccccggcagaagaagagctacaattttgcaaatccaaagtcacttctctaaacttgtttatacagaatgtgttttactggggccaactgacagcacgtttgtttttctaaaatcatcttctccttttttctcatctatgaagcagattagcggtggtacaacaccattctctaattcaactcaataaccgagccaaatgcatcttcatttcctcttggttggcacttaaataattacttttaaagatcttttatcttctctgtctctttttgacagatggatgattcttttcttggaagtctaggataaaattaacaacttcagaaataaaatgcctcctccctgcttttatctctctgatgggtgatttttgatgtaaacatgacaagaagaagagcaaagcactataaaacttagaaatggggtttaggacaaagccaggggtttgaggcagggagagaccaactgtggggtggaagatgggaattctcccaccaccacaatcaatggtacctgtaacagcagctaacacttgcctaatggtctgtgtgccgacagtgtcaggctgtctctgcatctgtcaccttctttgaacctctcaacaactccgtgcagtgggcaccattattattcccaattgacagatgaggacactgaggcacagagatgggaactaagtggtttgaggtcaccagctaaagaacagtagagccaagacttgggctgcaatgctgggtggttgactgccgggtgaatcttgatgtctaaatgtgtatggaatttgctgaacagaggggatggcagaggttggaggaggagaggggaggtgaagagaaagaaagaaaggagctggggctctgaaatagagatggaatgatgaggatgagacctccatttcccacatgctaggaggaggggctttctgctggactctacagatatttcagaagcttctgtgtccacatcagctcaccttgcttgcaacaagaagggatggctgcgtggagtggtttttctttatatacaacttatccaataagagtttcctatagaagaaggacttagaaagcagcacagcactgaggggtggcctctcgggtcaagtcagctaccctgggattctggctcagtcatgccgtcacttgctgaggcttctggccagcaaggtgctcatgagctctccaggatgctcagctctgctgggctcactcaactgtgcgggtctccagggagaaagcgcgtgttccagagctcacctgtgattagggtcacagcctggttcctgctgaacgggtaatcagggcagctctgtagtcaccgccccgccatggcgcttatcagacacatttgcaggttcttgcaggagctcttgccttagttcctttaatgtggataaaagcacacaaggggcacatcccacttttctgcctccccttgctgctcacaaaacccctcccagctctctgctcctcatcctccctcctgccctcttctccccctcacatcacatgaggcctcctccctctgaccatcagcatggccaccgctcctggctgatctccaagttcctgggcatgtgctccttggagagcaggaatttgtcctttgactaaacctcaaatctgcttaaaatctttagtaaagtgcaacagaagctcctttctgggtagagaactcgattcccccttcatggcacccctcaaggggtttctttggttggatgaattaaatgtggctcctagttttaataactctcaggcagaaatggctttcagatcatcatttacttgcatgtgtgactaattaccaaagaaagccagagcaatggattttgccagactttccttgaccttaggattgattggggtctggtgggccaatagtgcctgctgcagtgccagggctgagtgcctgctgcagaggctccggagctcattagctgcttacccaggccagtgggcaagcctgctggctggagaggaccccaaagtgtcatatactccccggggcctgctctgcacttccaggcctccccgcctttaagggaaaggtggagtggcaaagggagcctcgaactggctttaaactgggcagctttacaacaagacgtcttctttatttcctgtaacaacactttttaggggaaatgacatgtgatagaaaagaacagctcaggaaagtaaagtacagcgaggaaagtaaagtccaaatttagggtaatgtgagagagaggaggtggtttgtgggggtgtctgatttacattttggtattaaaatatgtcagatgtgcctggagcaatctatgagatgaattggaagagaatgtagcagggatcagaatgcaggcttaagtctatcagctggatcagaaatcttaaccatcacagcctcagtttacaaggtgcattctttctccctcatcgtactcacccaggcacaagaaaaatgactacctttgttcagccacttcatagagcttttgaaaaaagagttcctggaataatgacagtcagtcccacgttctcctttaggtgtctatttttaagttgcttttcaaaagaactcatttaggagagctaggggcaaggttggaaggcataaggacaaacatctgagcgtgaatttaaaaacgtgacgcccttgccctgtttagggtgcgggttggagacgttccaggtcacgtaatcaaatgacagctattaattggacttgagacccctttgggaaaagcctcttcgtaaccccgagtttcacggtcatgggctgggcttttttcttgctttggcgtggatgggaaagtgcaactcagtacaagggctgtggctctttctttcgtctagacattggccgcagggcaaggcgatgcccatcaaaggcatggtttgaaaaacatcaaggacatttaagggtaaatctttagatacacatgtctgttcttagcacccaaacagaatccatgtcgaacttaatgtatacgttaaaacgtacaataatctctaaaggaagaagaaagctgtaaatggcatttttcttgacagagattgcaaacgggaggctacatgcagttaactcgtgaggtgaggacatagaaaaaacatgaattaaaaaaatgttttgccactgattttaaaatatcatacatacaacagtggtttggggcttacatagttgactctcacgattgcccagtggagggactaaggttaaaacgaaacagatcctaagaagagaaagattatggctttgagcttcttacaacgtaagggtaaactcaaacagatgctaatgggtggctgattagatttgtaaggagctgtatattttagaccagttgttaagcacagattctgagggtgactgcataaaatgtgggttttgcaaatggtctgcaaaacccagcaacaaaggtcaaatgacaattcaacttcttatgtaattataaccccatttgagggtgtacctgcagcaaggactctgacagatcaagcaagatcagttttagtttcgttggacaacaccatgaaagatactctttcctctaattggggatattaagtccacatagtcaccagttacaatctgggtttgaagttcaacttttcctaatagagaagaggtcaaaattaagcaggaatatgtgtttcccagggccgatgattgttaagagttgccataaaacttgtttccccagtcatgcattctatgaagaaatgctgtggggttaaaaagtctcaggttttctcttttgaattttaagaatgacacaatgcaagatgtatatttttttttcaaaaagaaaataaatgactcattattgattttattaaaggtttagtgaagtagtacgatcaagatgaaaagaaaacatgtttttgtaatggaaagtttcttaaacttatgatgagcacattctttgtgttatttatttacttatttatttgagatggagtctctctctcttgcccaggctggagtgcagtagcgcgatcttggctcactgcaacctctgcctcccaggttcaagcaattctcctgtctcagcctcctgagtagctgggactataggctcctaccaccacgcccagctaatttttgtagttttagtagagacagggcttcaccatattggtctgactggtctcgaactcctgacctcaggtgatccgcccgccttggcctcccaaagtgctgggattacaggtgtgagccaccgcacccaacctgcgttattttttaaaattctaatttctactctcagtgtttcattagagatgtgatcgggggaaggcattcacaatttgtctatggtccttctgttcttagaccactggacacattgaactatttggacgcacagataatatcaggacctaagcctggggcttttcattaatttaaaatgactttctagaaaggtcttcatactgggagaaaagaagaattttaggggatgcatgcatacaggtttatgttatatttaatgatatttttatgaaacacaacattaaatatcctgctgttaaagtattataggctgcatagtattgattagaagcatcccagactgtgaacttcccaaaagggacaattttatgtcattcacaagtctgactgctggttgggcacttggtaaatgtccagttactgaatgaataaataagttttgggatgtggatttatcagttgctgtaatcaataggccaggcaccctcttctctaaatgttgaggcttgtggttgggatacatttgggaaagttgtattccatcttttgttctttactcctggtttgaaacctgtgtttgccatgtaaatccttttatgtgggaaatgggtgcattgttatatacgcaacataagtgctctcatgacagtaaaagaaaatgagaaaaaataagaaggatctcaacagaaggacctcttgacatttgggaaaatgtcagggaaaatatgggaacggagcaagggacgtagaattctaatatcctatgtttccctgttgtctccattgagactagctcacttcagataagctcaatgaaactcaagcaaaagagactgtagccagagaggcagagcctgtgaataccttggaaagtggtttgctgtattgaaacagaaaaccaatttgactgtgattagaagagaataagagagagtctaagcagatctgtagtaatatagccccagtgcccaatctccatcagcccagttgtaaactctggcatattgttgaaggtaaacatctagcacgcggaaagcaagttccatattattgcaaggaaataatttaattatcatctaaaattaattcttaatagcatactcataatattaattaaaataaataattgatatttgaatatttaaatattttagtaaatttatatttgaaataggaatatatgaaaatttatatgcaaaaagggatggattcaaatttcttttcttggggagttcgaaactgaattgcacgtccatatccccatgtgattaatctgataggagctctgctttcctatcatccccagggatgaactatttaccattcttcttcccatttttcaaatgaggtgcaatgtgaacaatgaatacagaaacgttttccagtcacctggcacaagggcctttggggtatagatatgggaatgttcgataatggattgttttgtgccacaaacaaagcaagcttgccacagtcatcaatggctcaaacctataaatgccacattcatgttggggccattctacatgaacaatttagcataagccacacattccaggcatgggtctgcttgtatattgtttatgcctcacaaagagctctgaatttatgcttcagaatctcactgaatttactgctcattccatttctggaagggaaacacttggcccatatttatgacattgccagtagaaaaatcaatcacccactaaatgccattattttatattttactcttaacctgccattttataaatgaaaggaagacaaattagactcataaagcaggaaggtaatcatccacaaattgaacatttaagggcaaggaagcaaaagctgtgaactgttccaaccattcaaataaggcaattttcctcacaaaggagctagaatagagagcaggggagtccctctcttcaaggtttctgccctccattttaggacagtcttggacttggatgagactaaaacgtctccagccatacacgagtcagacctcttcctcgtagttcaaaagacaacttttgaatgttaaatattatttacgacggtttgatagcaaaatgggatccagattggcttgagatcacgctattcctggtataacaatccaagtctgtggtatagtggcatgacaaaagacacagtcatctgttcccgtagcaccacatctgtgctttggtcaataatcgaatgaagtaatggttattttaattttatatgacctctgagaaaaggactccagaagttaacaagacccattaacatgtgtcttaatcaaataagagtaaaaatataacaaggaaacacagaaacacaagagggagaaataatataatttcttccttttttttcaagatcttttttttttttctaaaaaacaatacaagcatctgttcatcaggtggttaagttctagtattttaaaaaaaaacctagttaaaaggttacacctgctttaaaatttatgattcttatgtacagtagctcccccttatcttcagatgcccggtgaatggctgaaagtgtgggtggtaccgaatcctacacatgctatgctttttccatccgataatacctgaaagtgctgctaagtggctacgggcaggtagtgtagacagtgtggatacgctgggcagatgaatgattcatgttcttagacagcaagcggtttcataacgctactcagtagagtgtgcaatttgcaacttatgaattgtttatttctgggattttccattgaatatttttggactgtggttagcagcaggtaactcaaacctcagaaagtgaaaccaaggaaggttaagggggaactactgtgtgcaatttctttattaaataatagccactgtttcgttaggagttgttagagaaatatcacttttttttttcttgtacccagcaaaatgactaattgtatttagggttttctttttcaaattgtaaattttctcacagttttttttttgttatgcagagaaatctctgatgcaatgaatgggtcaaattttgagctgagtgtggctgtgtgacagcatcctgggtgctggtctcctcatctctgaggggtgacagcatacacacagacactggtgctgccacaagtctgcccatgtccaagacgggcgatggtgtggagccttcctttacagatcataactctgcatcttccagagagttttaggtggaaatagcaacaagcaaaacttcaaaccattatgccatagtgagatcttctccttaaaacaataagggtgacttgacgtgattttatcctcttgccttctatgactttccacaattgtggttgctctaacaacaactgtctgttttagcatatcaatgttttgggaactatcttttcaatcttcctgcagatccataacagaactatggaatagtgtccacaatgactaaggatatcaatactcccaagtttttgatagtgtaccttaatagggaaaaaatttgaccatgtatacacaacaaatttttatttattttacaattatgtatacatgcgaatatgccaatatagtaagagttaatcattaaaggaagggtaaggaaatctgtaattccaatagactttttggtaactgtacttctttttgagtctaatttgatggctgaggtttttaagcttgtattggtgcccatgaagacatcctaagaaaagaaggtttagttagtgcttctatcgtttccttggtgtttgtgctgatggtgttagtattattttcagtctatgatttaatgcagaatttttcaattaaatctgaatatatatttaattgaaatatatattaaatatatagtaaataatatatatatgatttactattttaaccacttttaagtgtacagttcagcggtattaattacatttacactgtcgtgaaacgggtccacagaacttgttcatctttcaaagccaagactctgcacccattcaacaaccactctccattaccccgcccctatcctctggcaaacccattctatttcttacctctatcagtttgactacttttggtacctcctgtgcgtggaatcatacagtatttgtctttttgtgactggcttattttacttagcataatgtcttcaaggttcatctatgttgtggcctgtgactatataggacattttaaaagccacttacctactgtgggaagattagtttagttaaaggtagattgtataatctgtaaatcctcttaatggaacataaggaactgcaaggtatcacatgatgatattctgagagcaagtcaacaggcagtgtgtctgggacaatctcccattgtgggactcctactctttcctacccaccaagtgatgatgtcattatcaatccagatattagctatgaatgaaacctaatttttaaattgatcttagatcctacacaaatataaatagaaattctaaagtcttctttaccatgagtgtttgtggcagtgaagcaccttacaaccccagaggtgccgttgacactgtggtctgtgccaacagcactgcctggagttgtgctgtgaacaacctatgccactgaacatggtggctctgcccttccttgagttgatgtcagcctgcttaaggacggttgaccttgagaaaggctgtcgtttttatagttccacttagaattcagggaatcagagaagggcatcgttgtcatttcattcaaagtggtcattttaaaataggggactgagtgtccaacgatgaatcttgtgcagaatcacagagcttcttcagagaaaacctaagtttcctttccacattttccatgctattacatttctcattttctggatacaacctaatttcttttaaacctgtccaaattccacttagggtttgcacaagtaatttattaaattaaaattgtcctgaatatttttattagccttgagtaaaaaaagaacagccacagaaatcttgacaaagccattgttttgttcatcaggtcttccactctatttctagggattccagcttccaccctgacacccccagcctcccatcccgtcacacacagagaagctgagaaatgttaataatgcttccctgtggaatgtttcattaagacccttgttgggcatggtggctcactcctgtaatcccagcactttgggagacccaggtgggaggattggttaagcccaggagttagagaccagcctgggcaacatggcgaaaccccgtctctaccaaaaattaaaaaaaaaaaaaaaattagccgggtgtggtggtgcattcctgtagtcccagctactcaggaggctgagatgggtggatggtttgagcctgggaggtggaggttgcagtgagccatgatcatgccactgcactccagcctggacaacagagccagatcctgcctcaaaacaaaaacaaatacaaaaacaaaacaaaacaatcaaagaaacaagacccttgttggcaaagttttcttttgttttgcctggtagtgttcttgactttgaggttataccaatcacctttatgccttgcttacttcctagtgctctgtttgaatgaggaagagcattctgaaccctaacatacacaatttttagaaaacatttgtccagaaaatggtggccctttttatggccaaaaccattgcatatataatcagtcatcacaaattttgtagtcacatttctttttttcttctagattgtgacgagagagagagagagattatgtcttctataccgtttcatcttcccagcactatatcattgaactcccattgatggagaatcaataagacgtggtccttaccccttaaagaacttgtagggggagacagaatcacataaaattaactctactctggtgtccacgcagagctacaggcctattctctgtataaagcaagtgccaggatgcatgggttaatttgccattgctcagagctgggaaggagaggaaagaagatgctaatgggtaaccttcccaaagcagccggggcttacagaagtaggggctcagcacacattgattgaagaatagcactacgatagcactctgcgaatcttaaaagtcatacaatttagagccatgtgagaatttagcaatcttcaagctcattgtatagatacatgtccattatgatactgtagttaattctgaactcctgcctggtgataaaaattgctttaaacatgttggacattttctcatccacatcaatgaatatttgggctctagggacttgttgcatctttctttaaaagtgaaaagtcttctgtatattggaaagagattacatgaggacagtcaattacatttttgaaagtgcacacattggttggttgtaaaatttacatgatccaattgtgagaactgtgtacatggatttaggtatgtctgttatttccctttgtgagagtatctatccgtgcttgctcatggtagagtatcattgcactttgtatctcagagcttctagtggcttcttaaccattatattattgtcttttctttgaagtttgctcaggggatgggctcaaccctgtatttataactctgctctcacatatgcttaagtcttgtcaaaatatctagataatacagtgccacacctcaaatatttctggaaatgttctatacctcagaaatgtgggatattttacctcttcttgaagaaaattttcttttctttcctttttctttttttttttttgagactgaattttactctttttgcccagggtggagtgcaatggcgctatcttagctcactgcaaagtccacctcctgggttcaagtgattctcctgcctcagcctcctgagtagctgggattacaggtgcgcaccaccatgaccagctaattttgtaattttagtagagatggggtttcaccatgttggccgggctggtctcaaactcctgacctcaagtgatctgcttgcctcggcctcccaaagagctgggattgtaggcattaagccaccaatcctggccaagaaagtttcttaaaatagatgtagcaatttgtcaagcacctccaccaaatacctccttcaagttcatagttatttttcatccaggttccttctttgccgtctttaaaaatgattcatttcatttctcaggcactattctatgaatttccatgtcatcactttttttctgagttcttgctaggagccagaattggctgaaattcctatgagagttcccccacagttgcattttggatgaggatttcgaatttcacatgacaaaatataaatgccgctaaatgtaactccagaggtacaagcagtggcgtcggaggccccttctctggctccttaatgcccccattagtattacaacaaggaaaagagacatgggctgaagagtcaggcagatactggcagaagtgagtccagttaaaaacacatcatggttctgtaacccgccctgctggccccctctgccttcaacctcttttgaggtaacgtagctcagagttcagacatccataaaagcctgtgacagggagtagggcaggaccagtgacataatttgtggccccaatgaaaaatcaatacgatgccccttgttaaacattgattagaatttgaagatggggacagcaacatatcagaccaagccagggcccttctgagagtggtcccccttggaccgcatgggtcactctctcatgaggccagtcctgggtcaaaatgagaagcatcccaattgctttttaatgaacaaattaaaaacaaaagaggcagagctgaagaaacataattccattatctttgcaatgtctggagatatctatatctatctatatctatatctatatctgtatctatatctatatctatatctatatctatatctatatctatatctatatctatatctatctatatctattccctgtccaagtggaagctctcaaaatggcccaagcctgaccatggaggtcagtgggtggagggtctttcccacaaatccaagggagctttcaagttggtttggaggaagcctccctagcagcatgcttgaataagaaactattgtgttcaagcatcagcttggctggtgctgaggactcttttgatgatgaagtaataaaatggattcaaaatcacttggcatatgtatgtgcatgtacatctgtgtgtgcgtgtgtgtgagtgtgtgtgtgtgcatgcgtgtgagtgtgtgtgtatacgtgtatatgtttaaaggccatataaatgctaaactctgtgtgcaaatgtcctcgaattctgattccaactgtctttatcgagtgctggttgtttatccaggtgaaagcatccgctggccagttttgtcccacgtctttttctatcaagtctttggtcctcacttcttcttcctgagtatgtccggagggaacagaatgcagacgtactaggcttttcagttaaagaaacatttttgtatgctgggctttggaaataaagaggtctaccttagtaattccgggatcaatatgtgcagataggaagtaatttggtggtgtgacctttggccatttgtaagtgccttgtccctggaaaacaatgtttaaattggaattgggtttgttttccagccaattaaatccttctggatttcagaggaatttgaaacaaaatatggaacaaatatctattatgaaggaggcacagctgttagatgagttggttgttcgtattggtggtcgtgtgtgcattttatttttttttgtgggagagtagaattttcacttctgcggggagcatctgatcaaatggcccatataacttttacctgtctgctaatctgagtctcaatccacttcttgggctgtgacagctgatttaggacaaaacattccttttcttccaaaagtatacaatcttgggcttctactgttttctgaagctatttttgttctagttgaatgttggggggagaaacctggctatttgtttattattataccaaaaaagaaagtctccagcttctgaagcttggggcactcactgttagagaaacatgtttggcagcacacagggccaaataaactacacacctgcatttcattacaacaggtcattgcgggaacagtggcattagcctccataggaaaagggtttgcatgggggtctaggaagccagttaaacacatgaaaaacacattgagacacctggacagagtgatttatgaagcaagaactgttttcatggtgccagggtcctgtcctcgcagatgcatgaaacgtacatctgcagttctgacatcacagcggacacgggactctgagtgatgcattactgagttccctgacaatgtgaaatgcatttgtcccgttttttcctaaaatggcccacctattttcaaatgcagagtcctgtgcgatgtcatacatttccacaatgttgctttaaaataagagagggcaggaaacgtgattccgactctgcacccagatggactgaggcataatatgtctgcatcgttgatggcagaaagggggcgtccaagtcaggttttccgtcttccaagccaatctttccccttctagaccggaaagattaaatggcaagtagaacaccaagtcaatctgcccagactcaaattccattccctgaccccctcacatagctgtaacatgcttgggcataatcctaagcctctctgtgtctcaagttttctctccatccagtcgggataaaggcagtagccaccttgtagtaggcttgtttccatgagagtgtttagctgctcttactatgactgaaaaaacatagctgcttgcatttgcagacagagccttgtgacttggtgcaaagaaaggaaaacatctttgccgaacttggaggtctcatctattcactcagctctaaatatgggcttctcttgaataaccgcaggtttggcctgtgtgctttctttctcacacctttttgttcacttgatgaggatgccgagtgcagcggtacattacgcttggctcaaccgtggcagagccaatgtggccatggtgagagatcattcaggatggatgactgcttagggactggcagggcaagagtctcccagctgttgcggcatttcatcctgtggtctttggtcattctttggcttttatctgagtacacccggcatggcattttaccagctgtactggggaggactgggggaatggaaagctggcattactgctgaaagcaaagaaaagatgtgtctttctctgtggccggtttttgtaatccgggaagaccccatgtgggttttctgatctcatgtcagcttccctagttgaagtataaaattgctagaagaaccacatcatcctcggagggacaggcaggcatccttagtgttcttgaaatgattacatcgtcagtttcatttagttctagaagactggccctgcctgttggtttttcccctaatcgtctgtgtaagaaagacttacccttaaatgggtgagttacaggcagggctcagtttctgtcattacactgatctttcattgacagttttccaccctctgttactcttggcatcgggctggtcagccataacttctagggatggggagagaaatcgaatctcttctattcttctctgtactgcttcaatctggcaacttctacgtagactgtgagaatataaccttgtaataaacatttgggtctctttgcctttgtccgagagcccactgttattttttttctaatcacagcagctgctctagctagcatctggctcatataccagcagcctttattctgagactaatctaaggattcaacaccaattcaggaaggcaatcaaagaagtgggttggatggacaagtatttcctttgtgtacagttcagatgcagaaggtggtagacacctacattgatgcattgtcctagcatcctacagatccatggggttgccaagggtggcttggtggggttggggggtgcaggtgaatttggctgtagctggcataaatggaggtgcttgcatgttgattcctgggccctttgacccaacctctggtttggggagaggctgctgattagagcagatgcacacaccttgtaacagggccactgagttctcccagtcttccatccacatttcttctttgtcatcagcgttccctcctcctgtattttccctttctagaaaaaaatatgagctgtgatttgtacaaaacacacaaaatgcatccgttggaatcagagatccaggaaacttcagctgaaattaacaacttcgtaacacaggtagagcctacgtccttcatgagaaaaatgacacaaatctcagtattctttgtttggagtctcttgacatccatgtgaggtacatattttctgtattctattttattttaattcaccatgaaaaagaaactggtcaaataaagaagccaaggctttgaggagcagaatcatttatttgtggtgattcagccatatttactcccagtgtttcaactgtgagctcaatgcactgttttcattacttttactatattgcaagttgaatacaatgaaaaaaaaaggagaaacatctcttcttaagcctgttttaccattattttgctctctgatttttcttagaaaccaaatccatgcaatgtgagtgtttttatctcatttagttctcacacattaatgaggtgggtatattgttattctcatgtaataaaaacagacactgaggctcagagaagttaagtgacctgaactgggccacacagctgctggggaccagggctgggattacctgggtagttggattccagcacacttatttttgaggttaagtttattaaggtgtaatttacatgtggtaaaatctaccccttttagttgtatgttcgatgagttttgacatatgcagtcttttttttttttcttttgagagatggaatttctcttttgttgcccaggctggagtgcaatggtgtgatcttggctcactgcaacctccgcctcccaggttcaagcaattctcgtgcctcaacctcccaagtagctgggattacaggcatgcaccaccatgcccagctaattttgtatttttagtagagacggggtttcaccatgttggtcaggctgttctcaaactcccgacctcaggtgatccgcctgtctcagactcccaaagtgctgggattacaggagtgagccaacgcacccagctgacatgcagtcttataattgagatatagactattctggccaggcatggtggctcatacctgtaatcccagcactctgggaggctgaggcaggcaggtcacctgaggtcaggagttcgagaccagcctggccaacatggcaaaaccttgtctctactaaaattacaaaagttagccaggcgtggtggcatgtgcctgtaatcccagctactcgggaggctgagacaggacaattgcttgaacccaaggaggcagaggttgcagtgagtggagatcatgccactgcactccaggctgggtgacagaggagactccgtcttaaaaagagagagagagagagagagagacagagattattctatcacctgaaaagtttatttgtgtgcttatagtcagtcctttctttctacccttggccctagagcccacattcttcaccagcacaccttaaataaaaataagcccaattacgatgcaaggtatttacaccgttttgagtatagcatgatcatatcagcttttaagtcaattaaatctcatagtgcgacagtttataaatgttactttataatgaatagctgaagtatagaaaagtaacaaaatgacaccagagtgacctatgttcctggtccttgtaaattatgccaggatctctgactgcagggagggcattcaatgaatgggaacgcttttgattctgaacagcagccttagccagagccgttaaatgggtttctgtcctgctccttctcaaactgacactgagcaagcgccacctgctcctgctccagggggctattcaaccatgtagtcccaggggagccagggctgtgggaggtgttggttgctaagaagcaacgagcctgaggcctagccgcgagcctgaggcccagcggagctcccggttgccctccctctgctctgaccacagcttgtccctctgccaggcgctgccctcacaaggcagccgagaaggacatcaggctggcggctggggaaacctctggctcggggctggagaaacagttctgggcatgtggttgagggaggacacatctcttctttctagcccagggagtgtcctacctccatgtggtttggggttcaggagagaattcagcccatgcccgtggagtcacatccccctgcagagggcacacacccaagctgcgctgaaggagatgccctcccctgtgccctgggcatcccccaaagccaggcaccctctccctcccctgggacaggacgccaggacaggccccagagcctgggagccagactttgcccggctttctttcctgagcgtgcttctatcagctcctgtggatgagtctgttctttcctatgttgctgtctgaatgtattaattagtctgcgggcagcttaaacaacagaaatgtattctcttatagttctggagaccagaagtttacaatcctggtgtctgccgggttggttccttctgagcaccatgagggagaatctgctccaggcccctcttccgggcttgtagatgctgtcttctccctgtgtgtccacactgtcttccctctgcatgtctgtgttcaaattgtcccttttaataaggacacagtcctatttgattagagcccattctaatgagctctctttactcgattgcaaagatgttatcttccaataggatgacactgtggggtacttggggttagggcttcctcatgtgaattgtgggtggaggtcccaattcagcccaccatactgcaaaagtggtagtagctctgcccaatgtcaaggaccattcagaaccttctatgatattaattttcaggaaactgacagcaacacaaaagtcgtcaccatgagtctttgttgagccaagttgaataaacaagtggcttattttactaaaatacaaatctactaaatacactaatactagtaaaatactagtaaaaatactaaatctactaaaatacaaatctactaaaaatacaaaattagctgggcatggtggtagatgcctgtaatcccagctacttgggaggctgaggcaggagaattgcttgaacctgggaggtggaggttgcagtgagccaagatcacaccattgcactccagcctgggcaacaaaagagaaattccatctcaaaaataaacaagtgacaagtatgaaatatgtaagatttgaaaagtcagagggagttccaaatgaactcaacagtgtgggctggacatttcactgtgaaatctgtgaaattagaagagtccacacagaagtcattaaatagcaactgttccttaagttgtaatgtatatctttatgaaattatatatatggcatgtggttggttttataaaagagagactatatatatgtccacctataagaagatgaaaagaaaatattctgaagtattaacatggattaactctgattagttgaattgtaggtggctttttgcatttttccttgctcatttatgttccaaaaatttcacaacggccatatcctacttttgcaaatagaaaacagtgttcttcagcatgaaaattggcacaaagaagaatttttttaaagtagaaaatgcgaattttaaaaatatagctgtgaaaaaaagtataaaattaattccaataaaataaatcgtggatacctgaaaatgatggtacgtttataaatggtttgcctaaactgcagtgatgctaattaattctcttaccataaaggtcaggataaaaaaatgacaggaatagaacgtagtatttgaggcagaatttcagcctttgggtcttccagaggtgagaatgaaagaagagaggaggaattagaaaggttaatgcctttgtcattgaaaatcccatcacttttttttaaccaactttttttttgttttttggtttttttttttttaaaaaaccttctagctgaagttttcttttgacatgaatttctacacctttagggattaaattaatgctcaatttttggaatgttattaggagaattatagatgacaaaaatatcactggcgagaaattaaatcttttctgtctctgtcacaaaatgtaggcataaaagtctcttctgctcatcagacaaattcagcaactttgattttgaagttgcctttgatgataggtcttcaatgttcctgagaatccatttgcttaatgatcgaggtggcctcaagcagtcttcagctacgtgcttacctgcccggctgttgatgccatttcactgtgcaatccctgtgctttgcttctctgttcattcaaagatggatcatctaagagcctgattagccttcgtcaaaataacattacatataataccatagtaacaggcctttttgtttctttataaacagggtgattcagagaaagcagacaagaaacccttagaagggcttactggggtgactggaggcagtcctgcattttgtgtctctgctgtgtggggtattaattgtgcgaggaatatgcaatatctgaaacttcatggtccccatgtgcaatatataccaaagatatgcggattcgtgtttttccccttttttatgatccatctagggaactgcttgtcgagatgctgccattccaggggagctaaaaaccctgaaaccattagaagtgttgatatcaggatgctacagcacaaaaagaagacagcactgtggagaaaaataacttacgagaagacacagcaccgggggatagacgctgttaagtagcacttgctaacaagagctttcaagccaccatgagaacgagatggatttattttccttcctttgcagaatctcagcaactctgtggtagacaggggccaacagaagtcagacgttgggaacggggggcaaaattttaaagaggactcaggaacaaatacttcctttcttttcataaaccacccatttaacatcactcaacaatggctgttgtggtaaacgctgtcactgatggataagtggggggagcgtggctgctgggtccaggctccttagatgtggccagtaggaggcatggattatcatttttctttggcagggagggaactgagacttcaatgaggaatttctccagtgatacgcagctggtggggacagtcagtggttggcacacctccctcaagagctgacagcggtgtgagttaggggactcccccgctgcccccgatgtcaatcattcttgggtctcagctcctcccctccacgctgagatggttgctttattctctgcccggccctccaggctgtgagccaccaaagtggaagcagtgggtcccttctgcttgggaccctcgggcccagcccaggacctggctcagcaaaggcaaaaatgaacagtccaggagttggtcccctgacctggctgagtctgggtacctgtctgaccctgtacccgtgactttttctcctgacagctttgcacattggtaaaggtacctaatttctacgtttcactttaaaaagtagtctttacttcttagcctgggagacaccacagtcctttaactagagaagttttcctgtgccgtagccgtgagaggctgacagcaagactgggaggagcccatttcacttccatccctgcgtggcttgatcacggggccgagagggaacgcctctgtgagccaggggcctctgtgggtccagttgtcccttgtcccctgtggatctggcagcatgaggatgctctctttctttctagtgttgccaaagccagattcatgaataaagctcttacgaatatttggtggccacataggcaagtctactggggagatgggaaagaaagggaggagtgtatggcaccctaagaaatttggagatgacctgggccctgacagcttcagaagcctccttattccctaacccttaggggtcttcaaaagtggtgagccccccgcccagtccaaccatatctcaccaaattaaatatcaaaccaagttctttttttttttttttttttttttgagacagagtcttgctctgtcacccaggctgcagtaccgtggcacgatctcggctcactgcaagctccgcctcccgggttcacgccattctcctgccttagcctcctgagtagctgggactacaggcacccaccaccacgcctggctaattttttgtatttttagtagagatggggtttcactgtgttagccaggatggtctctatctcctgacctcgtgatctgcctgcctcggcctcccaaagtgctgggattacaggcgtgagccaccgtgcccagcctcaaaccaagttcttagagtgaatacagatttacccacttaaatgctagaggcatacattcagaaaaaaatattattagactgcagtttggaccccaaatttaaccagctggaattcatttcacatttcatactcttcaatctctggaatgaaaaatacgtgtcttttaatgggaacttgtattttatcctaaagatggaacaaagtgtactgggctgaattatttcccaaataggcatgatctgtctcgtgttctgggttatgataaatgataaaacaggtttgggtgagttggcttctaactgatgtatgaatagcacactgattttatgggtatagacaacaaagggtggaagcgaggccttccactgcagcattctagaagtcgtgtaataaacactctcaaaacaaccacagaagtccttcaggcccaggcatggcccatgatacaatgaaaaggtttcaatgactgtattagaataattttctgaaagcttggaattactgggtttctccaatcttttccttacttcagggagacatagtgactagagttggattgagccacactgaagcccaagacagaaggaaatatcggtcattccaatcctgtctatttcaaattttaatatttcgttatctatttatttatttattttgagacagcctcactcttgttgcccaggctggagtgcaatggcatgatctcggttcagtgcaacctctgcctcccaggttcaagcgattctcctgccccagcctccagagtggctgggattacaggcatttgccaccccacccagctcatttttttttttttaattttcatttttagtagagacgggttttcaccatgttggccaggctggtctcaaactcctgacctcaggtgatccacccacctcggcctcccaaagtgctgggattacaggcatgagccaccgtgcctggacaaaattttaatattttgttcatcatgactttttgcagtactttttatttgaaaaatattgcgttaacatatgatttattttgattactgagtttcttggagccctcttaaattttgtgcccaggggaaatgccttgcttgccttatccagtggtggctatttcaagaacactgtgattttgtaatggatttcacaaggaagaatagtagactgagaagtaattgagttttttgttttcaaaggaatttgtttgtgggactgttagtgatgtttgggatgccagcacattttctgttcaagccctgaactgaagacctaggtattgatgatgttgcacagctcctaaatgtagcatacttatgttcagacatatctttatgtccattctaagctcaaagtacagacagaaatggatccaaggccaactattcacgtggaacttgatgtggtctgttcaactagcagggtattgaatatgaagggattgtttgtgattttgcaacttagtgaaaaaaaaatagtcacccagccttgtctatgtgctgagtcagacacctctcatgtgtcactaggccctctctgaggacccccgtgggtggctgcctcagcgtgggctctgcagacttcaggcaggtacacagtaacagcatgtcatctcctgcccacatcaatcacctccacctccaccccttgccttggggcttcctcatcaacccaggcagatgcaaggtgcaagactttgcatggtccagatgcatggggaattggtgctctgtggagcaccttggatcaacgagagatggcagctggtggtgtagggtccagccctacggggcttagcgggtattctcctcgtgtgtggagacaagagattgtaataaataaaggcataagacgaagagataaagagaaaacagctgggcctgggggaccactaccatcaaggcgcgtagaccggcagtggccccgaacggctgggctggccgttatttattgcatacaagacaagggggcagggtaaggagggtgaatcttctaagtgattgacaaggtgaagcaagtcacgtgattacaggatagggggcccttcccttttaggtagccgaagcagagagagaaggcagcataggtcagcgttttcttctctgcacttataagaaagatcaaagactttaagactttcactatttcttctactgctatctactacgaacttcaaagaggaaccaggagtacgggaggagcatgaaagtggacaaggagtgtgaccattgaagcacagcaccacagggaggggtttaggcctccggatgactgcaggcaggcctggataatatccagccttccacaagaagctggtggagcagagcgttccctgactcctccaaggaaaggagactcccttttgcggtctgctaagtaacaggtgccttcccagacactggcgttaccgcttgatcaaggagccctcaagcggcccctatgcgggcgtgacagagggctcacctcttgccttctaggtcacttctcacaatgtcccttcagcacctcaccccatgtccgccggttattcctaggttatatcagtaatgcaacaaagagtaatattaaaagctaatgattaataatgtttataataatgattgataattgttcatgatcatctctacatctaatttgtattatgactatccttattctaactattttctttattatactgaaacagtttgtgccttcagtctcttgccttggcacctaggtaatcctccaccccacggtggataactttttagtcttctccctagagcctctgtcctcagacacagttcacacagctctcgggggccacactgcaagatcagcatttagaattttgtgttttaaaactttttttaagttttaatttttgtgggtacatagtaggtgtatatatttataggggacatgagacattttgatataggcatgcaatgtgaaataaatacatcatggagaatggggtatgcattcccttaagcatgtatcctttgagttacaaacaattcaagtacactctttaaattgttttaaagtgtacagttattattgactatcgtcaccctgttgtgctatcaaatagcaggtcttatttattctaactattttttgtacctattaaccatccccacctcccctattcagccgtaaaaaagaatgagatctagtcatttgcaacaacatggatggaactggagattattatgttaagggaaataagccagttacagaaagacaaacattgcatattcttacgtacttgtcaggtctaaaaatcaaaacaattgaactcgtagacacggagggtagaaggatggttaccctccggggctgggaggatcagcatttggttatacctctcaatggccagtctgatgaagaatcctcatagcagctgcctctccactccccaccttcccatcctctctctttcacttctggcactgccttctctaataaaaccatagtgcaaccgacatctgcctcatgctctgttttctgggaaacccagactaatatatattcttcactactttcctgcagatcttggtgcaacagaactgtcaggaaaatttacttcaaaaaattgtacctttaaacacctctcctgcctttttatggataccgggcatgtatgagattatcagaggaaacagttagatgcacaaggatcttcatatacccatttgttatttagattccctttaattggggttttattagattctgaagcactctacttttattcacgaacactgccaagaatggaaacctcgctttctgaagctgtgtgaattgcttggcacgtgtttaagaacccagaggcatctcatctgcctcctggatcctcctgtggcccctccagagagtcccagctcatgcaccacctgcctggcacagggccaaggatgcaggctgtgattgtgaattctggtgttgaaccttagatgggtatgtagcatgttctaatggtgaaataaggacaatgttgaaggaagtcattgtgagggaaatatgtcttttgtttgaaagagcccagtggtgttactatttgtgattgtgaaggtcaatccaagtggaatacactgtctcacagagggccacctgtcttttgtggaggtctctggagataaaaatagggacattgctctaacatgtttaaagagggagggccagtgtctctgatgatgtagatagacacagagctggcttgagcaccagggacgctgatttcaggcggttgaaggaggaaggggctgtccttcttctagactctttggtgagcatccaggaagatgccgtgtctgcatggggacaaggtgttgtggagggtcccaaacaggagcattttatggaagagaagtcattagggtgggtgtcgggctggagatgatcaggagaagaatgagaacatctgagctgagtattgtgatatagactgcaagactcatggtggcattctcctgggagtggaattattagacaatctaatggatctggttttgctgtggttgaagttgatgtgactttttcctctactacccctctactacctgcttccccagaagaaaagatagcaaaatcccacatgtatcaacccatgctcttcttagcagtcataactgattcactctctagatcccttggaaaacatcaaagaagatatctgctgacaaattcgcagatatctgaatgcatattcatgaagctctcaaatactctagtccttagttctctagataattctaatagcatattttctacacctgcattaaattggtcattgtggctatgcatatttgtttagggagaacttgtactgccttctgcataacctaacatattaagctatattgatatctaaactgaatgacacattggtggtattcatgataccattgaatcatttctgaaattcctaagaaagagctcaggattccagaatctcatatcagggtttgctctgaagccaatttattgtgccctgtttcttgaatatttgatttcatttattagttcaatgataataaataatacttttgaactatgactacttctgttcagtcggcaacatatgttcttaggatgatgaacttgtagttggagctcattcagaacagagataagagatcacatcttctcctatttggggatgagagtggggtggagagaaaaggcagcctcttcccgaagatgctaacttctgtcacgtcatgaaaaagaatcttttcgttggttgcttagagaatgacctacctccgtctgtctgttcatttgaccatcaacccatctacccatccgtccacccatttatctactcatctgttcatctatccatccatccatccattcatccacacacccattcatccatccacccacccatccatccatccacccactcatccatccttaggtccacccatccattcttccatccatccatccatccatccatccacccattcatccacctatccattcatctacccatccattcatccattcaactactcatccattcatctatccatccacacatccatctgctatttattttagtagagcctagctctgggtgcttatgttatttaaacattaacaaagatctgatagcatttctggaattgagcccttggctgttgtttgcctctgcttattcctaaaagccaagtgttctcaaaactccagcctgtggtgttaatgaagtcacatttaccttcaaactcaaatcttactgcctcctaactccccacccgctgatagaggccctcaggaggtatgctgcacacagtactgagagatgcttaagtacagtggctaaaaggaagggctccagagccagcttcttgggggctgaattctgcctctgcctcttccccacttcgtgggcttgagcaaattcctctctgtgcctcaggatataattggtaaagtgaggctgatgaagacactaagggcatctaccccatcagggatgctgtcagaactcaatgagttgatggtgcttgagcgcccttgaagcctggccccagcagcatgaaccatgattacccgacacccagcctggtgtagactctctccagtataaattcagtgaaactgcaactgcctggtattgtaaagaccagaccctgggaatggggcagctcttggagaattccccctctgccctcagacctccattgaaaatgtcaaaaggtcccaaagaattctgaaatgagatactttcaatactttcaataacgagttctttttttgtcaggatcattttttgatgtgagacaccttcacctacgacataaatcaccttcattgtgtctccgttaaatagaacctgacataaaaaccccatcttagaaatcccgaaaaaatgactgcttttctcccctgtgcacatttcattttggttttcctctggtttctaaaaagtgatcttttatggaaaagttattcatgacatttgaaaggcatccatatttaaggcatttaaagactgtggggttgagcatgcacctattttgcacttgccttccatttaatttgactttattctactctaaaacactgttcttttattccgtgaaattttcttttatttgagccatctatgaattatgcagggaaagatactggatttgaatgccagagtttaatcacctgaggtggctgttccatctcggatttggtccaactcagtagtagtcagatttccacccagtgcagcaaacgtacgagccttgtgtttaaaaagaggaggcatcaacataaggacagacaaaaagaagcaggcatttttacttgcaaatctgctatatttaagaaatggtttacctgatttaaatcattttacattgactcagatggaaggtgaatggtattcgtaataagtgggaagctttactttgcttctttattgggttattgtctgcataatgcaataagcatacacgaggatggttcactttgttaatataaatctggatcatttactctatttatttatacctctcagattctgagagcaaggttttccgagatgatacatttaccattaattaagggttgacaaatgacctgagaatttcttatggcaatgttgaacgtcaaaggaaactgattgttatttttctgatattgtttttaggctaaagacctggacccaaatatgaattttgagggtaccttatcccttagtcacctatcatggttttctccttgttcggtgctctgctgtttttttctaggatcccattcagatagtggcatcacagtagcaattcctgaggtcaaggaagtccaggctccagtcttgactctgccactcattagctgcatgatctggggcaagtcatgctccctacctccctcattttcttcatctgaaagttagagacttggctgggcatggtggctcatgcctgtaatcccagcactttgggaggccgaggcgggtggatcatggggtcacgagttcgagaccagcctggccaacatggtgaaaccccatctctactaaaaatacaaaaattagccgggggtggtggcatgtgcctgtaatcccagctactctgtaggctgaggtaggagaatagcttgaacctgggaggcggaggttgcagtgagccaagatcctgccactgcactccagcctgggacagagtgagactctgtctcaaaaaaaaaaaaaaaaaaagttagagactttataagcttttcaatccttttcaactcaaagcatactttttgataacaaccaaaaaatgggattgacaaaatgcttctctctccataactagaaccacgttaagctttgaggaaacaccctttctgtttacatgtgtggtgcatttcacgcggctccccagacttcacacccagagaatcttgcccaaagtgttaagtctaaccttaaaagacttcatacttctagttaacctggtaaaatgaaaatgcaaaggacaagtataaacaatggcagaaaaaatagtttataagtaggaggaaacataagagtttcttagttgattaaaatttatttaaaaagaagacattgggccgggcgcggtggctcacgcctgtaatcccagcactttgggaggctgaggtggatggattatgaggtcaggagatcgagaccatcctgactaacacggcaaaactctgtctctactaaaaatacaaaaaattagccgtacgtggtcgtgggcgcctgtagtcccagccacctgggaggctgaagcaggagaatggtgtgaacctgggaggcggaggttgcagcgagccaagattgcgccgctgcactccagcctggatgacagagccagactcagtctcaaaaaaaaaaaaaaaaaaaaaagaagacattggacatggtgactggaacgaaaatacagcagcctaatgactgtcattaacaaaatgacgcattaacaatgctgatcttgtagctgatacagaaccttggctgttgccttcatattttcattgaagttgtgcttgatctccctcctggtttctcttgttactggtgacctgcattcctagagcagtggatgtggatgagggggccggtctgtgcagcttcagtacatcctttcttggtggatccattcctactctcactagcacagtgctttagccatctgagctaaagtaacatagaacttgatataatgcaagagatgtttgcaacaataaaagagacaaaagtaatcccgagtatatctgataacaattgcttttttcttttattttttgcctttagcgacaaggtgctggggcaaccaatggaaaagacaagacatctggtgaaaatggtaagaggacatgaatagtccaagttctttctcttttgccatctgcagccctgggtatgcagcaggtgcggatcatacatcccatcccaaacagcttactatatgtgtctgcgcttcagcttacagaggattttagcaattcacagtgagcactgaggtctggttttatgaagaaaactgagctagctaaatgccgtgataagaagtttcccttccataggaggactcccattttgggcaacatggtaattacaatgcaaatctagttctctgctttcttcattagggtgggtgagaatcatccaagttgttgtgaggataaaatgagatcaaacgagataagtgatttgaaaactgtgaagtacacaacttctgaaatgatgttttaaaacttgcttcagccctccggagcacacacaatgcggtgctggtccactggaaggtgctgagtcagtgaatgtcactgcagcgattcaccagcaaataaaaatgatagcagtgacaggaacattgcatcctgcctcttcatgggcccatctcaaccatgaccctaaattgtaggaatgatcatcatatttttatggatcaggaaatggaggcttggcattggggtgagatttagctagaaatgggaagtgcatggatcctgaaggaaatagagccagttggaaccccaggtctctaactttagcaattgacataagaacaagcataataataaaaaatacccagtggtatgcaccaagggccacagcatagttccggtgaggtgagactctgggtgttcttcctttctgttaactcaagatgaactctccttttatggaaaatgactcttgcttccaactagatgaaattgatgctagtgtccatcaatcagattgtggataatgccaatctcaaataccatcggttaaaattccctggggcctcacaacccctttggagcctctgtggtgggtctgagctgagcaagactcaagtatgagaatgttgctctgcgtctgcagcctgccaatatgcccacccatttagggcagtcctattgggcagggtgagtgcagtgttccctgggtaaaggggtcatcatatcaataagtagagaggtgggggctccacaatgtcctaattggagctagggggctgggagaagaaggaaacaaggttttccatgaggccaatggctcttcctttgctgcccagggcttttcctgtctcctgtgtgtgagttggggtgggtgtgtggggtactggcaaggaaggcaggaagcagaggaaggagcaaaggatggggcttaaaagggaggagcaatattgtagttgcctatatgaggaaggacccactgcctgccataggggagcatagggcgctgtgagcctccactgattttcccagttcatacattcgtagccatctgttcatgcaagttcctttccactgaacctcacaaccttagaattagagttttacagtcagaagacttctcagagatcctctattgtcgtgattctcaacttttttttgagacagagtttcactcttgttgcccaggctggagtgcaatgggacaatctcggctcactgcaacgtctgcctccagggttcaagtgattctcctgcctcagcctcttgagtagctgggattacaggcacccaccaccacgcctggctaatttttgtatttttagtagagacaggatttcaccatgttggccaggctggtctcgaactcctgaactcagctgatccacccgcctcggccccccaaagtggtgggattacaggtgtgagccactgcacccagccaacatttttgttctcacaactcctttccattttaaagaattcttgaggaccccaaagaacttttgtttatgttggtgatatctattgatgtttgtcatgctggaaccctactgactcttatagagatggtactgaagaaaagacctggagccagtgaacaagacataggatttattgaggggagttacctatagggcagtccagtggcggtgggctggataaaagaaccacagctgcctgtaacaagcatgcagtttacacagcgttttcacttagcaccctccctctagcaacttctacttggcaatctacattcattccaaaacaaatgtccccaatcccctgtatggcctgcatcccatgggatgggctgggaattcagatgttcctcatagataagaatgaatctctatactggccactcccagattccttagctcggaactcgactccaagcacacattcttcttagaccatagggtcattctcagggtatgcttaagttacgctattgatatcaggtgtatctgccatacactgtctcctatattagaaattaaaatggagaaagttttaaatggtttttcttattaatttattaaaaataaaataataaacccactacatgtgaatgtaagtaacattttaaaaaatgaaaagtcattatattttccaaaatggaaaaggatatttagtaaaaagtggcaattttacatttctgcaactctctttaaagtctggtttgacagaggacagctggattttcatactggcttctgtgttcaatctgttatatcatgtgatgtgtagcctatggaaaattccactgctcacttgtgagagtatgagatttaaaagagcaaataatatcctttaagatcaaactcttaccttttataataataatatcttttataagaccaaaaatgtttttgatcttttgggctcccttaaaggatgtaggcaccccccagggtacctggttcacactttgggaactactgctcagcatgtctcatgtcatgccttgaggagcctgaagaccaggcacatggtgacgaagccaggactaggtcctatgtgttcgatgtctctgccccttggctttatcttgacatcctattggtctttcaaaccatgctgacatgctcagtgctttgcaccaaagggaattaccggctactataagtgatgccattttctgccattcaaagacatggaatttcttttagctgaaaaccagtccacaccagtggaaactgagtgaggttttttatggaggtataaaaattaattaaatggaaatattcctgatgctatgaataaggcttttcattagataattctagatattaaatgatagtcacttttgggtagaaaagtgaatttgagattattttacagttactggataatggcaatgtataaatgtaaattattattaacatgctatactttaatttcagctaaaactgcctatatatgatatttgtacgtgatactttattataatttaaagtctgtgcttttgcctttaaaaaggagcaaagacaaaaactggaacagcccaagaaagatgagggtaaaaacttctagaagtaatctaaaaaacattttcctaaagaattgaagttacttaattttttattcttaaattcctgatatgagacgatcatcttggaatttccattttaacctagtattacattccattgaaattcaaatgattttattctgtcattataggtatctagggagatctattatgttaatgtatatttcctattaatatcaaatgaagctgtctacatgtcttgaaggagcaaggacccttgagtattgaaatatgaagtattaaaaaaaccatcaaaatgttatgaaatttggatagtaacacttcataataaaaggaacattctcaattgtattaattgtctgtacaagtcagggtgtttgtaatccaaatattgtaaatttagttgaggtctccatttaatgtataaagcaataaagactgtgggagtgaactacaggtgccttgaaattatttggatcacaaaagacccaagtcaggtacattaaaacttcagaaggtatttagattcctgggctttgctgccatttcattacattgaatattatcttgagagcaccattttctgggaatgaaatttctcatacattcaatatttatttttgttattgttgtcaacatggtatttattgatgtgaaatatgacctactgcatactctccagaatgtttcaaaatccttctcattttcccaggatgttaacctcagtacacacactcaaacccgatgtttctactagaactagattttgtggtatcatctgctgtaggaagacaggtttttcagaaatattagggttataattttttttaatgtagaaaataaacgtttcagggcttggaggttcagagatttttcattcctctatgagcaaagcaccttcatcatttgattagttaagccacagatttcatttgtttctggaaataactttctacttgaaagaaacaatagctcatagcttccattataaatctttctgtctcatttaaatggctaaattaaattcaaacatgtttacaaatatagacacaaccatctgaatctagattattcaccacaaattagtaatttgaacacaaccgaaagatttttgggggaaactacattgctggatttcttgatccataccttgatactggttgtccggagagactccaagagttaaatttttttattgacacacaaaagcagaaaaatactggaagcagagtggctgctgggagccttccaacctgaaaaagagatttatgaataataaacctcgtgatggggcttactttcagagcttggaggcttacccaagctaaattgaatttctaaaactggaatggatttctcttgacttagcgagctgtgatgcatttgtttctacaaggctctgtttctgcgggtggaaggtgtatgaacacacctgattttaagaaaagaatcccctcacatccaggctgtaggtaaatgctacagaggaaaggtattattttgaactacctgtgggactcactgtcgttgtgtttctttgagtgtgagtagccttgcacaagctcgggctccatgcttgaatacctgtgccccttccttgggagagagactatggcctgagaagtttcagtaggtgtggggatattctaggagtacttaagacttagtttgatttgggctgggcgcggtggctcacgcctgtaatcccagcactttgggaggccgaggcgggcggatcacgaggtcaggagatcgagaccatcctggctaacacggtgaaaccccgtctctactaaaaatacaaaaaattatccgggcgcggtggcgggcgcctgtagtcccagctactcgggaggctgaggcaggagaatggcgtgaacctgggaggcggagcttgcagtgagccgagattgtgccactgcaatccggcctgggctaaagagtgggactccgtctcaaaaaaaacaaaaaaaaaaaaaaaaaaaagacttagtttgatttgatatgattatatgattgccaagaataaataagatgaaatgttaatgtactgggtactttcctctccctgttttaaatcaatcccaaaccataaaagtttaagtttatctcacctttggattttgaggaaacacacacacatgtacacacacagagtcactttcttatttttctgctcttaagtaggtagagagagaggtcccaagaaggacttgcatttataggcagacagatgtacatgctaccattaaatggactgtgatttttcaaatagaaaaatataattcaaaaatttatttccaaagaaatttcactaccccctacccctggccctttgtggctccatatctcccagtagacattcatccccctcccacttgtgtctgtgttcttggtgcaagattatctttcaagacctacgtgctgacttaggcagattttgcttaggatatattttatctgtcaactctccttggtatgtggaattgtgtggagtaaggcttcgtgtgcaaggctgggcatcagcttggagtaagaagaaactgatgttgagtccaggaaccaaggatgattgagtgatcactatcatgcccgagagaggaggtcagttttggcagaggatgctgcctggctgatcttgctcctgggcacagggtggctggatggaaggcaagaggaagaaatgcattctagaaaggctacagagggaatacacctgcccctgcctgcagcagtgactcagctctgctctgcttcagatgtggattgtggtcatatcagagtttgaggatggatcatggtacacggaagacagagcagcctgcgattcagagttttgctgttcctgtaggccagagggtgcaggtgtctggaatccagggggaggtgaagcttgagtccacactgagggtctaatatgccaattctgcacaaatctcaatagtccacatggaaacttaacaagccaagatgagcctctttgaaaaggaacagagacaactttgagtatccagctgcaacgtgtgtcagaaatgtcagaaaggttataactttcacagacagcactggctgtgaaaaaagcacctacctaaagtcattaatgtctaaggtgtgcaacatatcccaggctagaaagctctcaatctgtttcccgctagggcaatgaaaccctgagctgcctaaaggtcagaatccaccatagtgagagatagcaagtgctgctgtgaataccagaggcacatgggtggtggcgccttcaaggtaaaaactcaaacagctccggtctccatctggaggttcttggccctttatctccttccttttccatatttgaagaaatcagaaaaaaaaaaatcaaaacaaaagtgactgatgctcaagagatggggtcctttgtgctttcggctccaaacactctaaagagtttctattctggaaggaagaaatggacacacaaagctgcttctgatattgatccagatggggaaaaaatgacattggaattgcttattaagccgggcatttaaagccatcgcagtctccagacaaacccagtcaatgggtgatattgctcaacaagtgagctgattctgcctgaaggttactttagggattagtgctgagggaatttattaacatccatctcagttagaagagtgactttttgtttgttttgcccttcagagtgagcattataataacttcattgagcaaggaacacctcggataagtatggtgcttctgatcagtcttgggtgtgaaagtgcttgaagccttgtggacagaagcggagattcctacccatctctagctgcaattctttacatctataggcttgcatagtttaaaaaaatgtggccgggcacggtggatcatgtctgtaatcccagcactttgggaggctgaggcgggtggatcacgaggtcaggagatcgagaccatcctggctaacacggtgaaaccctgtctctactaaaaatacaaaaaattagccgggggtgtggtggtggctgcctgtagtcccagatactcaggaggctgaggcaggagaatggcgtgaacccaggaggcagagcttgcagtgagccgagaccatgccactgcactccaacctgggtgacagagcgagactccgtctcaaaatgctcccccatgctgtcttccctttgatgttaccatggccttgcaggtgggttgggagaggatctcaggcaaagttgctggtgaactcaggattgtcctaaggtcacataaataagaggaggaaagttttggtcatctgacccacagtccaaacacaccaggttgtctctatttacactttctcctgacttccctcttgaccagggtcttgtttgtaaatgggcaacttggatgggctgtggtctaagcccctggaacagaataaagttaatgggctacatcttagccaaaccagaaactattgtatccatagtaccattatcccatcagtttagttaactagcctctggcaaataggggtgatctcagactaataatagggacagccatgatagttttcaaaattaaaacatcaaagcaacatgttcatttatagcctcttcatatttcacctgccctcttcctcaccctttctctttctccctccttccttccttccgctcctccttcttccccttccttccccctttccttcccttccttccctccctccgtcttttcttcctacctttcatccttttcttccttctttctttttgagattgagcagtggacagctttagatcagctgaaatagaatttcattccacatcatacagagaaagcttatacaccttggtgaaaaagtaaagttatacattattctcaatgaattactcttaaagatcttcaagatcttggccatgaagcagcttgaaccaggaaaatgtgcatccctctagcctttggaaacctgccccaagcaggagatattccaggtttcaaatgtttcaggttctgcttgtcaattacttttatggaaatagtatttctcacgcgcttgaaaacacttttgctcttttaagtaggtgaaacactcataatcttatttatagaattaatgtgcacagcaggcagtttttcagaagcaaaaccccacctagatctcaggctgggccaaatgataagatggtttaaatttgtaggtttcatattaggtacatctgggattacaaaagcacggaaaaatgctaatatttctccttggaaaataatgctgtcagtgggcagagtgggctgaattgtcctcaaagagtagatctccctctcaagctagatgtgttctcccctccacatgaggcagggaagagtcagccttgcagccctgggcgtgtctccaggatacccttagagcaaccacagaacatgcttcggaccccgggcagaagtccccagggtcacccaagaaagctctctagcagccaatctagaacatagctcgggggagatgcagacccagaaaaggagaaaccagaatcccagggaggcctatctggaggagcggacagacaggggctttggcctgttgaaaggtacagctaagctgtggcaactttgcagagactagtaggttgctagaattaagaaataaagtccctgcgtggtggctcccagcactttgggaggccgaggtgggtggatcacctgaagtcaggagtttgaggccagcctggccaacatggtgaaactccatctctaccaaaaaatacaaaaattatctgggcgtggtggcgggcacctgtaatcccagttacttgggaggctgaggcatgacaatcacttgaacccaggaggcggagattgaggtgagcagacatcgtgccactgcactccagcctgggcaacagagtgagactctgtctcaaaaaaaaaaaagtgccttctaatcacttctacccgttggactttcccagccaaaactacagagcaatgattaggtggagcaggagaagagaggagagtgaatctgagaagcaagaaatgcagggttccattgtaccaagtgcctttttccagttgttgccaatgtacttccctccctggcctttgggccaggtcaccctgttcccctgtttgtccccactaattaaaaaatgtagcttattatacgataagtgattgctgcttcccaaagacaaagtgggaatgatttttgtatacaaattctggattggcttcagaaaaaaaaagcaagaaaagtggtttattgaaaccatgctttcatgttaactgtgtagtgtaattggctggcttagtatttctaaaggaaagaaaactgtcagatctcttttttaaggatgacatatttgacattcctggagcgatgaggctgtccctgtgaaggttaatgtgtgttccccacagtcggtgtaagcccctcatccctcctcaggtgtcattaaggggacaaggaggtggccaaagaggagacacaagaggaagctggctggaaggtgggtgagggtggatacagagctgttcacacctccacccagtctgaacggaaggccccgctagatggcaggccaactgggaaatggggaagggactgggcaggcacggttctcccctgtaagctggggtttgtcagaccaggagggaggaggagagtagcttccagccacacacccacagactgtgggcttccagaaagctgctttctcaagggctcagtggcgccccaggctctgctcccactgagcagagtctctggatgactccccagctgcctcggcccaaaggaaaggtggggaggagggtgggagtgcccgcggctccaggtgctctctgggaggctggagtagctgctactgtgcctggggctgtaggtgttggcctgggttgggaggcaggactgaggtctcagaggagaggctaagctttgcctccacccctgtggagaggcgccaaggagccaatctgctttcattcaggtccctcttggatatcttggcttcataaccttgaattaaacttcaaatttgtgactgcaggatcagctgcttaaaaatatgagaaatgaccatctccttatttaaattgcacgtatttccttttaagttcttctctctcctcccccgacacaaccaggggaattgctcttttctgcaccatggtgaagaaatgaaatcagggcccctttaatgtcaagtacattctgaacgttcaagaaggaagaagaataacaagtactgtgagatcattgaatttaaaatgcagccatttatagacttcactatttccagcattaattcgaaggagtagatattacagttattataatgacaatttctcatggctattatggcatattgatctgttcttttactatcgctttttcctcgggcagatcctgtatctgctcaggctgagcacaccgttttcttacagactgttgttccgtgtcgctgctctgtttttctgacatgttatttccttcagtctcatcatgagcaagaagccaaattatttgcatatcactaggtttaattttaaaattgtatttcctttgaaagttacccccttctcctattcactaaggagcagatgcttcttattcacctgctgggatctccttgcattctggtcatggtttttctgttccagttgccatttccttttttcctcttgggatgtggaatggtgtagaactgtgatcagtggaaatacgtattgattggatagaccaagatatggctgggtgtgccgggaggaggaactgggaagtcagcgacgtggcctccatcacaacgtttatgaaaactctcccttcaggaacttatgattatgtgaaggggatgcttgctgctgtttttgtgcttggcaagcagcttcttcaaaatttcttccttcctttcttttcttttcttttttttttttgacatggagtttcgcttttgttgcccaggctggagtgcaatggcgtgaccttggctcaccgcaacctctgcctcccgggttcaagcgattctcctgcctcagccacccgagtagctgggattacaggcgcccgccaccacgtctggctaatttttgtatttttagtagagatggggtttctccatgttgttcaggctggtctcaaactcccgatctcaggcgatctgcccgcctcggcctcccaagccttcttcaatatttctaaggtgtgttcttctctctctactattctaccatcccagaccctgaaaacaattggaaatcgaatcatgctctggcgttcatttagacagcaaagtctcctcggatgtcagagagacactttagtggccgggcactgatgtgagtgaagcaagtctcacttcagactccagttgctaccagttcaccaaatccaagtgcaacagacctggcctgtgtaggagggcagacctcgcttcccacagcagtcatcgcaaacggggctaatcatcgtgggaccatgatcctcctctcacccaacctttcttacacttcaagtttcgctctttccacacaaacataaagcttttggcagtttggatggatgtgcactcaccaaaatccaatttcccaccagtccattaaaaaaaaaagtgtttttatagtgagctttgaaaatgggccaggccatgagaaatggtccatgcagatgctgggttgtagattataatgcatttgctggttggggaaagtgctttgaaggttcctcccaggtaactctgagctcagtaattgtttcatagaactttcagaataagatagagcaatgtttagcatccgattttggctggggttttccatggattagctgatgccaggctgcctccatgccagcaggagctgggcatttttgctgactgtttttagggtcttcctcgccctttagccatttccccggttgcagggcccctgagctgcttggcctgaaggcctgccaataaacctcatccgactcttggtttgctcatgaagggtggggcttgggtgaattcccatttgttctgtccctgccattctatgctttactcatttgttcctggttcacctgcagtgaatcattttatctctttgggttgcagcattgtacgacgacattgtctttgggcgcttgtcgaattctgactctttatgattctgtggctgtctctttcctgggacagtgtaggacatttgactccttttgattttattttctgtaagcatcaaggggatatcgcacatgagtccacaggagaaatacgatgtattttcttggtggaggcagtggaggggaaagtaagggcaatggatgggatctgaatgggattgtcaccggctgtgaacacaggataacaagtagttatttttgttgaaataacaactatttcaacaaaatgggtgaaaatgggaaaatttaacatttcctctagaaaaactgcatttccaactatctgacagtaaaacagggaaacagggtttattttcctggatctttctgtagcatatgtccagtttagaaaggaggctggcaccccagtgactggcctcgaggtgagcacaggtgtagacaacagtggtccactcgacagaaacacaaaagaagtgggtgcctccctctggtggcaattggcatacatgaaattaaagtgtgactgcgatctttcaggcagaaggtagccaacattctttagaaactttataaccttttcacctgtgggcctcgtcaacgtgacctggtaccaaccaagcactaggggaaacctcagccagaggttgccgggataggtgctccccagccccatggcaatgggatactgagttatagctgtttcttgaaaaagcctcacttgtcttttctataaatccagcctattgtcaccttaaatgatggctgtgtgtggaagagttgaaccgtagttttgaaattataatccagacttgtttgtggaagaaggagatagggttttagaagacaagatgagctacctgcagatgagatattcattcttattctattcacacatctgacagttgaacaaaactataaaacgttgccaattacctatctgggctagaaacggcctattaggtcaccccggccattcacagctggtgaaatatgactccctgttgtgtatttcctcagttcagcttaaaatgactttagcaaaaggtcagatgctactgctcctgggagatgtttgcaatctctaatagactgatgttagacatttttttttctaacattctatctaaatttgtttcttgacatcagtttcttgacatcagcctctgttaatgctcccttgagccatggcagctccaaatgggtattttatccctgcttaaatttttggtttagacagaaatgcttctactacctctgctgataattagaatgtgtcaagggatgatatttcattgttggtcttttgaaaggtttttttttttttttaaagtatttccaaactgattaatttttgatcctgttgccctgatcccagaaaatttctttctgtctttgaaatttcttgaaaagaataaaagtaatccactttatttttggtttgtaaaagctttttggatggggatgctccgatggcacccacaaagggcaggagccttgctttcctgccaaggtgccacataaaacaggccctggttaaatggtcacatttaaccaggccccatctgaattctgcctaggtgttcatctacctgaaccaatataaaaaaagtctggagcttcagaacttttcacaaccctgggaagaacttcccaatgccattttccggggtgattcggtgtcagaacgttattattttaatttaatctatttttatttttattttttagagacaaggtcttgctctgtctcccaggctggagtgcagtagtgagatcttagctcactctaaccttgaactcccagctcaagcaatcctcctgtttcagcctccagagtagctgggactacaggtgcgggccactataaccagataacttattttttgaagagatgaggtctaactatgttgcgcaggctggtctcaaactcctggcctcaagggatcctctcgcctaggcctcccaaagtgaggacattattacttgttgcttaaaactaacaccaaaactctactcttagttaatctttttgagtccaggttactatatgtagttcagctacttagtctagaatgccacataactttacttctggggtatttaattttagtatctttttataaatataagaactcatcttcctgataagtagaaaaaggtacagagcttaaaatgacccatctttaaaaaggtatttccaagaaatcagcaagtgcctggccatgagctcttaagatagtgtcattttaaaaaaagcaaatagaagtgctatgtctttgctccaaacctacaaagagaagggacgtgaggggctgtggctgtggattaggaaagcagagattgtgaagtttaactgtcacagggctggccgtccctagaaatcagcacccatctttgtttagacataaaatactcacttacaaatccaggcacacacctctgggcaacagccctctctgtccttatgacaacattctgatgtgggatgcccagtcatgttcagcatgtttgaagggtatttgaaaatatgggacttcagagtcgtatacggtagcgtctatttctgctctgccattttcttgccatgcgtgaaaagtgtagagcatgaaacgaaacacaggacccatgactgaatggagattccaggttggtggtagcctcaggcttgagattttgagcagtgatgggcgtctatcagctcagctgcgtggttggacctgggagggacttgaccctggctttgcttcacagaccccctttggagttgccagagagttgtaccccacgtgaaattccatacaaaacagacccgtctaccgaatagtcttgtgcatttaagaaggcttgtaatccctggaaatacgcaaagagaaacacctgtctgcagggattagaagctcagggtgaagagccagggcgggaagtgccccatgagatagcatggcccagcagctgagttgacagccagggccaagaaggacgcagaaacgtgtgtcatgaaggatgccagatgcacacacacactgtgggagaaaggcatttaaatcagacagcaccaaagagaataaagagtatttgtaaggagaaaaggcccagagtacccacttttgaaagcagctttagtccctttctgatgtacatgtgatgatttttcaacccaagctgctctttgctttccccattgttcatgaagctcttgggggctcttaccagcctttgtcttccttcttcacaaaaccctggaacacactccatttgccttggcttctacctttccttcttaaagtcaaaatctttggccaggcgtggtggctcatgtctgtaatcccagcactttgggagcaagtggatcacctgaggtcaggagttcgagatcagcctggccaacatggtggaacaccatctctactaaaaacatacacacacaaaattagctgggtgtggtggcgtgtgcctataatctcagctactcaggaggctgaggcaggagaatctcttgaacccaggaggcagaggttgcagtgagccgagatcatgccactgcactccagcctgggtgacagagctgtctcaaaaaaaaaaaaaagaaaaaaaaaagaagaaagtaaaattctttgtagaattatggggcaaggagaattagaagaaactcagtgggttcaagtgaggttcttatattaattaggctaattgatgttcctttgagactacttaaaaatgtcctgtaattatgattgcatttgactttttttctatttaaaaactggggaactgtatgaaattctctatggtggtgaaatttttagagtttaatgctttaaatctggtatttgaaattttagaagctggggcacatgtgagtcctagaaggtggtgagcaccctcaggagagtcagtcgatacctggtaaaaccagggaatatcagagaaaaaggaaaactccaattattccaaagctgtgaaaggaagaaacaaatagacctagtgcagaatgaagggagtggcctgaaatctgactagggaggtcaccgtccctggagcaggacctgctcacatcaatttcctgtgttttcaggcacttgaaaaactacacagtttccacaactgcaaagggaagggtatggaaggagaagcaaatgtcccacaaggagaaaaaaataacatgaagcagggaagcctcagagggaatgttgccaaaggttactgaatataaaggaagtatttctgcaaaaaaaaaaaaatctctgggatttttaaagcattaaatactatgaagaaatgaccacccatttcagaaactgaatggatgcacgtaagcaaaagataaaatgtgcagttcagggaaggaaatgagcccatccaatacacagtaaaatacatgtgaatttccattatcaacttgaaataaaatgtttcctgatgaattatacactgattatcacacacgtgtagaagatgaggttcatttaaaagaagctgaaaccccaagataacaactgcttaaacaatagagaaggttatttctctgtcatatagaaggattctggaggtagatggtcaaggggagtctgtgtagtttcaaggagcatcaagcatctgtcactgtttggcaatatttggcataagacttccaacttatggttgaatatggctgcatgagcaccagccattgcacctacatttcagccaacagaaaacagatatgaacagagggaaaaaatgggcaaggggtgtctgttaattttatcgtaagatttcttttttccacttacatcatattgaccaaatcctagttgcagggacacatccaacagtaaggaggctggaaactgttttctggataaccatgtgctcagccccagatcaggggttttggaactaagaaaaaggggataaacaaaggcaatgaacagactcagccacaacacctttctgctcctggagtttattgggtgcttacaagctggttagcttgcacagaggggttatctgaattgttggatgactaatttgtcctctatccctccaatcagcctgaagagattttttttctatgtttcctagtcagagtgtgaagaagggcaaactgtggcttttctgtggtttgctgttggggcagctagctgctgattcctgggaaggaatttcaattctttccatgtgctcagagagaagaaggcatttggtatgttattctcactcccaaaagcattttcatttacccactttccttcaagttattctcgagtaaatattaacatattttctatgtaaataaactaaaatcttgcaatctgatctctaaaagcacaagattaccccttttctttatataatatttctctcctcccctggccccagtctaactggttatggctataggaggtggtggtgcagacagcagaatctactcttgttggatttggaagaaagggcttttattataagacctttaataatttctggcttggtaaattttcctccatccctttgttttgaacctatgtatgtcttagctcaaccattattcaaccattgtggaagacagtgtggcaattcctcaaagatctagaagcagaaataccatttgacccagcaatcccattattgggtatatacccaaagggatataaatcattctattacaaagacacaagcgtgtatatgttcattgcagcactattcacaatagcagagacatgaagtcaacctaaatgcccatcagtaatagactggataaagaccatggaatactatgcagctctaaaaaaggaatgagatcatgtcctttgcagggacgtggatggagttggaagctgttatcctcagcaaactaacacaggaacagaaaatgaaacaccacatgttctcacttataagtgggagctgaatgatgagaacacatgaatgcatgggggagaacaatacacactggggcttattgggagggagagcatcaggaagaatagctaatggatgctgggcttaatacctaggcgatgggttgatctgtgaagcagatcaccatggcacacgtttacctatgtaacaaacctgcacatcctacacatgtaccctggagcttaaaataaaaattaaagaaaaaaaaattctgggaggcagagagctcagcctagatggtgtccagccagaaacaattcatatggaagatatttagcgacacgatagatctttctagcagatgcttgactgctcctaatgttgcctggcatgtgccaccaggcaaaggacactgggatgtccccacagctgccccagagaaacccagtacctctgcctcagggcttaccagaaggtgggatcttcctgtggttggctggcccctgatgcgcacttctgcctctcctatccttctagtgcacctgcctggccagccctcacctgtgcggcagacttccacccctgagacatcggggaatgatgtcctccagcttctcagcctggtggtagagggagaagctggaaggagggtgctttgggcaagccaggctgccggctgccgtcttgggcaatgcacctctgcattgggatggccctctactccttacaaactgtgtccctgcacatgctctccagagaaaaacaagcctgggcaaggatttgaacctcaggaaggcaaatctgaccacagtcaagagtcatgacttgaattcaagctgtccttagtcaagctgtttctcatcatacctctctgattgtctccatttttttcttgaaaatgtaggcatttggctagtggttctgggttgaattgtgtactccctccctatcaaattcatgtgttgaagccctaatctccataacctcagaatgtgatcttatttggagatagggtctttatagaggtaattcaattgaaatgaggtcctcaggctgggccctcatccagtctggctgctgtccttataagaagaagagatgaggacacagacattcacaaagggatcctcatgtgaggacacagagggaagccatctgcaagccaggagagaggtcttaggaggaacctgctctgccaacacgttaatcttggactccagcctcctggatgtgagaacataaatttctgttgcttaagtgaccccgtgtgtgatactttgtcatgatagcctaagcaattcatacaaataggaatgaattttgccttttcaacagaaaaattagtatttcttcaatgatgattataccttgtttttttgtgctcttcctcgcttaataaatttggaggaagatctgatctcattagttctcattctttgtaatcgataagcatggatttgtgctaatttgattatctagttccacaatgggcattttatataagccagggtgcctctggatggaagcccgagaaacagaataataggaaatagatgaccgagaggcgctcagagtaaactcttacttttggctaccaaattaggctttgtattaatgagaacttgatttgaacaatcgaagactgtgggtttcagaatacttctattttaggacaaaagagaattgttcgctcttggaaaaagctttaagtaccaaagaaggcactaacttggtaaatggaaagctagaagaaatgcgaattgtgtttttgatttggggaatacaatagatgcagaaagtccccttgcctgggactgctaatgcctgaacttgctcattaatctctgcctcttagcacagacctggaaaattgcaattctccgcaccagcagcccccattcgataaatatgcagccagcaggcaggaacgagaagtggctctgggctgtggggctggcttgttggaatcccacactccccaagctgcagagggattgcaactcaggaagtcaggcagaaggacacagtggctctctgcatgctttgttcccagctttttaaagagcttattgtctttttttaaattggcatttcataaagtgtgatgctgtatgccagcattattaggtactacgggtataaatttattgttataattttttttcctctggaggaattgaccttttctccaacactagacgccttattctctgagtatatcttgatccaatgtgaggtgtaaaggataaaagcaaggtgcaatccttgcttgctttgttacctgtctctttggctttctctgcctcaagggcaagggtttgggtccttaggagggaaccccactccctctctttggccgagtggcctcggtgtggccgaggggatcccagctaagagggccccagcagcacagaactccgcatcaattagcttaatgatatcaagggcaacacagctgacagatgttaattcttccaaagttaatattgtactttgaaagaaggtagaacattctaagaaccttggcattacaataccccaattgcaaggcatacttaagttaaatgactgttatttctttatagcttgctaaaatttaggtccttttatagtacgctatgtgctgtgactcctaatgaaggcagactcctactcgggactattatatcccaatttacttcttgggcacaaatttctgatctacagcattaggcgttaggaggtcattcatttctatcaaatcaatcttaaaatatgaagagtgataaatatgtaaattaaagcatttacctgtttgtgtggtgtgtatgagtgtgtatgtggtgtgatgtgtgtggtctaatgtgtgtatgtctatggtgtgtgtggtttgtgtgtgtgtggtgtgtatgtatgtgtagtgtgtggtgtgtaatgtgtatttgtgtatgtgtggtatgtgtttgtgtgtgtaatgtggtgtatttgtgagtgtgtggtatgtttgtgtgttttgtgtgtgtagtgtggtgtgtttgtgtgtggtgtgtatgagtgcgtgtggtgagggttgtgtttgtgtaggagtgtgtctggtgaggtgtgtttgtgtatgagtgcatgtgtgtggagtgagaggtgtgtgttggtgtgtgtgtggtgtgtgtgtggggtgtgtttgatgtgtgatgtgtgtggtgtgtgggtgtaggtatgtatgtgtggtgtgtgtgtgtagggtgtgtttgtgtgtgtgtggtgtgtgtgatgtgtgtgtgtgtttggtctgtgtgtggggtgtttgtgtgtgtggtgtgtgtggtgtagtgtgtttgatgtgtgatgtgtgatgtgtgtggtgtgtgtttgtgtgtgatacgatatgtgtgtttggtgtggtgtgggtgtggtgtgtttgtgtgatatgtgtttggtgtggtgtgtgtgtgtggtgtagtgtgtgtggtgtgtgtgtgtggtgtgtatttgatgtgtgatgtgtgatgtgtgtgtggtatgtgtgtggtgtgtttgcatatgtggtatgatgtgtgtttggtgtggtgtgtgcgtggtgtgtttgtgtgagtgtgtgtggtgtgtgactgtgtgatgggagtggatgtgtcggtctgttgtgtgtgtgtggcgtgttgtatgtgtgtgtgtctgtgtgttaaaagtaaaagctgctgtggtgatttattgctggttcctccaatgatctaaccatgatgacgtgagcaatgacctttcatcgccatcaactgggaaacaaacagatttgagagtttcctttcctaagtttaggggttaatatatttttgaattgtgctgtgtttcaaactttttatcctttctgggactgttgcaggatccatgaatagctctgtcatgccctaggtgacttttcatgtctgttaatttcctaggaatttatgttaattatttgaagcctgcctcttagattgtgaatgcacagatgaagaccatttttctggaagtgctatttcccaccatccgtgaagagccctggctgccgcccccatcctggttggcctcactgtggggctgtgcccctcccaggatggctccttggcagaggccccacctgacaatcttacctcacactctccagcggcctgctttgctctttgaatctctgaaattctattacttacttgtgcatttacctttccatttgttttcctggggagggaggggactaggtttgttctctgctctctcccagcccccaggacagggatggctctctcagaccactcgccgaactcatgaatttggtatagttcccccagacagcctggtaaaccagcagattttgcaagctggttgactgtattatgtgtttagacttggaccatccaagagatgcttttcccccagagctatattgactggtccataaagaagtctgtcagcttggtctacatctaaggagatgaagtagcacaaccccacaggatgaaaacaagatttggaacaagacccagatcccaagtcaggcttggccagtcttcacgaggtgatcttaagcgaggcccttctagaacggggatgatgaatgtttcctcagctctcataaatgactacgtaagtccaaactacagattacagaagcccaaattctctttgtaaaatagggaatcttaaattctgattctctatgatgcaaagcaactttaaaacctatgaagcctccaaattaggtcaggtgctgttataggctgagccgtgtcgtctccccacccaaattaatatgtggaagctctaacctctggtaccccagattgtaactacatttggagatggttaaagagatggttaattgattaatgttaaattaatgtcctcatgtggtgaggacacagcaaaaaggtggagagaggcctcacgagaaaccacacctgctaacaccttcatctccaacttctggcctccagaactgtgggaaaataaattcccattggtgaagccatctagtctctggtattttgttatggcagcccgagcaaactcatactcttctcgacaagtatctgctgatggactatgggactgatgtgagaacctctgctccagcaccaaactctgttgtatcagaatagataaatgcaagtggaattttaatttatcaaagcatttttctgttctttggattttcatgacaataccagagacttaaaaaaaatagagacaggatctcactatgttgcccaggctggtctcaaacttctgggctcaagtgaccctcctgcctcggcctcccaaagtgctaggattacaggtgtgagtcaccatgcctggccctgagactcgtaaaattcatttgggactgtcttcaactggtagtataatagttcctaacctttatatttatgattctctattttatatttgcccatcaaatgatctgtaaaataaaatctacttgagtatatgagggaggatctatttaatgctcaataaagagtggtttttattaccattccatctttaagaagggctgcctgagctttctcttgtgacataataaaacatataattgcagaggccaccttctattcagtttctgtgggggaaaggcagtatttcaggaaagtagcataagaaatgtctatactagtgcaaagtttaaacttgaataggactgttttgcttcctagtggaggtcatggcagaactgaatcaggggacgttccaagcctcagggagcatcatttcttcattatttttccaagcctcagggagcatcatttcttcattattcaagggccattggcagagctctgtgtcaggtcctggtggtttaatgaggtttctgctcagagggaaaagcctcattgcctggagccattttgcaactacactgtttgttgagaaagggcaatgtgacaggtgcacaggtaatggacaggtagctagataatgtagcagttcacgtagctgcccagcctgatagattttgattgtcacttcctttgaggtgagatcttacaggtgatggacttggctgatgtctgaaggccttgtgagggataatggccccccaggcacacaggacgttgaatcatgggaccatttttttggagctatagtgatcaataagtcgggtttcccctcgtcttctagtggagtgggaattgctgttctcttacatcagatctgctaattggcatgaatatctcttgactgttctgtggtcagcttgaaaatttcagaatgtctatgcagagtgggaaaaggtagaattccaggacctgcggcaaatacaagtaatgacaactgtgaagccctggatggcttacaaggtgttttggtgaaatacttcttaaaaggaaaagccgtagacaagtcaaatgtagtggagttgagcaaagaatgattccagaattaggcgtctctctgaaccagaacaggttctcagaactccagcctgccacgtggtcaggcagccttgatgggcagaaagcagacgtgaggcaccgaggcagcttaactggttacagtgcagcattttgccctgcttgagtaagttgcccacctgtgattgactgaaaatgggctgctgtgattgatggagagcccactatttgttgaccagagcatgcctgtacagtactcctgagttaggcttctagttagtttttgtactaagactgtagtttttatttgaggactggagtatggaggcatcctcaggccaaatgtaatttagtctaaaatgctgctccctcagactgaaaagcctccatggagagtgggcgtggccaaagtgattttccagtacacgcggcagaatcctatgtgcacatgtcagggagaggccacccagtccagacctaagccttcagccatctgtgtgaaggagaaagtggtaacatgacggaaatgattgtactgcaatctggacatgacaatggcattcgtttcgtccataccactcgtttagacgccctgctccctcctggacacagaagctctgcaaaggcctctaggccactaggagggcgtggtgtgtgccctcgtagctaaggagaatgtccttttgtattgtctaagctttacagtgacatgacttgtgagttgtggactgtatcggtcggcagtgggaagtctctcttttgaacaaattttaaggatattctttctgccttgtatttctgagctggggccatcttgcaacaagcccagcaaacacagctgaccatgatggccatgcgggcggccatgatggaaagtgcccccttcctccctggatgagggcccgagtgatccatgaatctcaccactgagcagacacagacaccctgaggctggagagccaccttactgcccacgtccccttcactggcctttgcagctctggccacgccatgcccagtacagtgtggcctgtgctttaaggtacaaccgagtgttgatctgaacataaacctaacactgggagccaggtagcacaggcttttgttttccagatgagaaaactgagcaccagagaagctaagaacttttttcagagtcacagagcagtcagaggcaatccccaaattcagattttacctgaaatccatagacccacttctgcagggtgcctggctcagtgcggagagtatctaggtgtgaggagagaggcagcctctcatccccaaggagactgagggctttggctgctgggacacgaggcctgtgttctttgtttttgtttttgtttgagacaggtctcactctgtttcccaggctggagtacagtggtgcaatcatagctcactgcagcctccacctcccgggctccagtgatcctcccctctcagtctcctgagtaactgggactatgctcagctctgtgtaaaaattagctgccaccactcctggctaatttttaactttttgtagaaacggtgtctccatatgctgcccaggctggtctcagactctcacctcagtctctgaatgtgctgagattaccggcatgagccaccacacctggccccgggttttgtttattccctggccagctattggtggcaggctctgttctaggcaagaagaggcttagaaacccgcctggagcttctcttgttctgctgggtccccacaggctcctctggggccacaggccctggcccaggggcatgagggtacacctgtgccttcctctttccctgtgtgcctattgaggtctggacgtctgcccctggacacctgtgcccctcttctctccattcagccttgagcatttcctgaggctttcccccatgaaacagcagtgctccctgacgtcattctcaggtgccaggtttcccatcttccttacagtgccccctgtgggctgtgtccctctggctgcccagacagtggctttctcaggacagctcccagctacatgcctccttggaggccccttgaggccctcctccatgacaatgctgcagggagtgaggacaaggactcgcctcacagactgaagttaaatggttaccaaggagggtaccgtgcttgtttagtcctccagataaaggcatgcctttgacagctgcctagcatattaattaatggctcacttgcaatcaacagttgttaattgaacacctactgtgtgtgtgcgctggatcctatgtaagctgttggaacaaggcggacaaagtcccgggcctcacagagctcacgctctagcgtagaagaccgaggacaaaccagagaaggaaacaaagaagtaaagtcatgggtagcaattgcaccgtgaagaactgcaatgcaggcttgggggtgtggcgtgcccctaggggacatattcggggaatgtcctctcctagggctcttcagtctccccagcaggcgtggccgagggcttccctgtgggtatcagcagtagaaagggccccctgtactgctcgtgggtccccgcctctgcccgggagtgatggggctggggaagctcctcacagggccaccctgctcctgtggccttgtcactgccactggggtcatccttggggaaccttggcaggctccaaggccctgaagagtggttctgggagtgggtgcctggctgtggtcccttcccttactctcctcccctacctttgtgcctgctgaatctggggtatttagaactgtactttcctgacttccagggccacagaccatttgtactgaaccctgtgccaccgagtctaattggttgtcccttctccactgcagtcgggtgccccattctcttccttacacactcctgactggctcagcggaaggagctcctgccactcctctaacagcatctgaccttccccgccgccccgggaactggactctctgaagtatacagaaaagtagcgattccttaaatgttagtggtttcttttttaaacaatgtaatatttttcaaatgaggaatcaatcagtcacttttggctgagatatcagtttaagatataagtgcaaaattgatttctgtgaactgtcctcactgtttcattatatatttccttaatatacataattttctgcgtcttcatttgtcatttgtcaaaaaataatattgccgctttcttccatcattataaaagggaaaagacaaatcaggccctttaaaaacttcagattccagcaacattttacatttaaaagggaaacttcccctcctacttggaatcaggagtgaatttttcccctttgcactcactgtacagttgatgcaaggattcctctgggagtagaaggatttgggactataaaccatcttatgaaaaatgacaactcccagtgctgtagatgctacctaaccaaggatgttattggtacaaaagggtttattgccatgagcacaaacactggagccatttgcattctgggtttgctagacacttgacctccagtcccaggctcatgtgataacattaattaaccacttttaaaacatctacttgagccacaggaaacttttacttctcccagtgatcctaccccttatttttctccaaagaaagggccctggcaatgtagaagacaatgtgaatagctacctggagtgtgagaaacagttccacttgtctatcatttgggctgtcctgggttaaaaaggaagcacccccatcccctgcctctgaaatattcctgaacattggtgcactcaacatctctgcttttatgagcattggcagcaagtttgaaatagaagacaacagttctctgatttgggtcatggctccatcagtcctacaaggcttccaaagccagagctgacattccctcctcctaggtgagaggatgattgaagggtcccaggtggaaactgattaggatctaggaaaattgagaggaggctgcttacagctctgcagatgcatctgaaataagtgctgattctcatctatctattacctgtctatctgtatttgtctatcatctacttatgtttgtctgtctgtctctctgatctatctatctatctatctatctatctatctatctatctatcatctatctatctatctgtctatctatctatctatctatctatctatcatctatctatctatctatctatcatcatctatctagagcaagcaggatagaacaggcaggccttacctcaagtcctcaaggaaccccagcttcctccaccctctctgatagagctggtgcctgagcattattatgcaaagtccctaaacaaggtagtggatgatgaactcaggctgcctggtgacactcaggaatagagccccactccctgctcactggctggggcttttcctctgcctcagaatgcctccagttctcccatctccaagttggctgtgctcctcacagggctggcctcctctgctctaggtgcaagcccagggtggcagcgaggctcttggcccaggtcccaggagaggtcagttctgtccccagttctggcttgagctaactccaaggcctcctttgtccttggatctcaattctggccacacctgagagtctttttaaaagaagtgtagatgtctggcctccccacagggacacggatttctcaacatccatcttgctcttaggagcacccttcccactgcggctgtgcaaggaggaagccctgagtctggggtgagaccctcatgcctgtatttaaaaaaagaaagaaaaagaaaaacgatgcctttgatgaatctgatgtttagccttcatcagactagaggcatttattattttattttagttttttatttctgtaggtttttggggaacaggtggtgtttggttacatgagtaagttcttcagtggtgatttgtaagattttgatacacccatcacctgagcagcatacactatacactctacggccataccaccctgaacacgccgggtctcatcagactagaggcttttgaaagacatttaccttccacgactgaagaattttattgatttatttgtttttccgtcttggctgcactggccctgtgctgtggtaaggtatacagcacagaggcccaagccttcgttcctcaccaccccccactttgtgtcctgtcaccgtgtgaattggtgaaatccctccacctcagcaagccatttgccaagtctacctcataggaacaagaatgtaagctttgtgaaagttcagtcgaactgtgaaggtcaaatggtgtcatcccatcttgacgatgataaaaatggaagccctgattgcaataagcaaatctttcctgagaatgacacacagaattatacacggaaactcagtatatgactctgctgactcagtaattgtgaatatcagctatcattggaccaatatcttagcaatattaaatggtacctctgtgagatagcaggagaaagtaacagcacagccagtattaaaaccatatatcaagatggtcactgagaacagaaaatcatgtgcagaaaatacatgaagtgttgagactgtgtccttgagtttcattgtcctgctcaggtggtagattctgagctctgtcaaaacactccactggattttactttgcagatgagctcttgtcctggggtgtaagttaagcccctgtgtgtgccccaaggtggacttcctggcttcacttatctagtggggctgtctgctttcctattttcagctcagtgattgccttctgtttgtgtttgtcttgctacagatggacagaagaaagttcaagaagaatttgacattgacatggatgcaccagagacagaacgtgcagcggtggccattcagtctcagttcagaaaattccagaagaagaaggctgggtctcagtcctagtgggagaaccccctcctagtccacctgaaaacaccaaattcaaccatcatctgtcaagaaattaaaagaacaacaccctagagagaagtcatccacacacaatccacacacgcatagcaaacctccaatgcatgtacagaaacctgtgatatttatacccttgtaggaaggtatagacaatggaattgtgagtagcttaatctctatgtttctctccattttcattcctcctgcaactattttccttgatgttgtaataaaatgaagttacgatgagtgaattcaagtgactgcctttctttctctctttattttacccgatgttagaggtgactgtgagccaggtgtctatttctttctcttaggagtcagagatgtaacacattgtcttctgttaggagcttttttgctgagagtgagagatccattttcagccatgcttgcctcatttggagagtcctaagtgctggctggcgatggcaacgtattttcttcttatcatgggaatagagccctgtatcctcgggtgccaaagacagaagtttccctggggaattatgactgattcaggagaacaaaatgggagaaggtgatgcatttgtgtttggagcatccccagatttactcagcagacccatttcagatctccaaaggggacactctagcctgttataggccattctgcagcttacctgcagtgctctgcacctgtgtggctccagggtactggcaccctctctaaactccccaacttcctctatgctgtgatttgccacgtggtagggttatttattgcaacctgtagcaatttagagaagctatcaggcctctcttccattccaccttctcccatgcaaaccttgcaggtaaactgttctgtaaatcccgaagtagttttgtaggcagtgaggagaggtccatcacatagagaggacctcaccgccactgatttgggagccagttggttgggtgggtaccctccttgggagacacttgtggcttttgtttgcacttttccacatgataacgtgatgtgtaagtcacatctcatcttcaacctcctgagatgtttgagatgctccacgactgctgtcgtacacagtgggacattgcatgtctttcctttgccagctccttaacaaagggtcaaggtggagcatgaagaataatgggaaaaggggtgagggatgacatcgtgtgtgtgcacatgtgtgtgcatgggtgtgtggatgtaagggatggtgtgagtgaggcatgggcaaggcaatgactgcaggtggatgtgccgctgttcctgcggcagggccccgtttattgtcaggaaggcacaggtcaagaaacactggcatgcttgggtgatttactgtctcaaaaatccctctgaaagtgtgcatattttcttgtgtaaggaaatctctcctgccagacaattccctgcagtcgttagagacagggaaaactcatagattctgatgaatttccaatcatcagagagctaaacaggatcactttggccctgataaccagcgaggactctgaggggctcctgatgctgtggtccctactgaaaagaggaccacaggctgaggggacactccaggaaaagcttcctgagacagcagagatatgaatgccacagaaatcagatgggtctccatgtagtcttctttggcgttcccttaagctaccaatgtaaagtaagccaggaacaaaacaaacacttacatattttggatcaatttcaccacacctcatacttcaagcacctccatcctctgaatagttcacctaaaggaagtaggggcactgtctatactggctgcactctggccagtgctgtcccaacgctgacccctctggaagctaatctggcttataatgaggatgctttctttagaggggactctccatgcacagcagaaaatcccaatggagtggttcttccctatgtccccaagggactgggaatattctttcagtaacaatggcccattgggggaagaaggatgaaagtggggtgagagacgtgaaatttggagaggtccctcaaagattgtgatgtgcctctcttgttccaatcacaggacaggggtataacggctttcctttgaaacacggggatgaatttaactattcacttcccaggtagattcatcagggtctagagcttcagctaacagcatgaggaagattccaaatgtgcccccatcagcataggaactgggtatgttgagtctatggtctcataaaaccagaagaaggacaagggattgtggctccaggcttgggagcaccttttccttaccatgggctacagtatttatttagggtaaaggaaggaaactcctgaggtgctatggggtgccagcaatttggagcatcagtaattcaatgtcccttcagccatgtgtattcaactcctgctgtgggtgtggacttggtgcagtggctgcaaagcaggacagtccttgtcaaggtgctgtcagtctggtggggaagggacgaggataagcagatgctggaatggaaggaggggcacagcacggcagatcatggagaatcaatcactcaagtcttctccaggtgcagccatgcccggcagtacactgaaggctgacaggagttcctgggtaaataagggtggtggttggtgaagaagtgtctgggcaaagtccttgagaaggaggtgcacaactttgccatcccagaggctgaatttatcattacacttcagcctgggggatgtgactctgctctctgaacttggggaggccaggaggcaagaacccaagtatttgagacttgaaactggatccatctttgacttacagtcagtcaaatgactacagagaagttacctacctcaagtagccagtttctttaacagcaaagtgatgataaaatctttgtgttaaggtggttggcaaagtgttaggaatttagaatgaggcaaaatgcatgagtgtctggctcagtgtaggtgtctaataaatgtaagctgtcattattgataaaccagtgtggtaaagagtcaaccatagcttcccttatcaacatgcaacacacaacacttcactcaactgaagccatgggactcagtttcccttggctacagccagttggaccagtggtaggcacttgactcaaggggtgggctcagcctgtctgaatatttctctagtgattctgaattaaccttcatgggagctgagccagttaaggtgagggagatgttgagctgggacaaggctggtgtggtgacaggtaaaagttgcaaaaaaggttttaaaaaactttttttttttcaaggagctgcaaaagcccatgtggagacaggtgcaggaagaaggagaggacttgagactcaaggtacatgagcccatgagagatgaagaggtagcctaggttgagttagtcatttggtagcaatgaatagaaacccactcatactagctaaaaaaagagagaattattcaggtctcacagacatccaagaatagaacatccaagacacccaagaaaagaacagaacaccatgggcaggcagaattatattagatttataaataaactagggcacagtggggaagaattgacgtctttatattattgtttttatagcattttatgacgtttggtggttttgtagttttcttcatataggtcttgcacatttctttttgttctatttctaagtgtttcatagtttttgttgtccttgtaagcacaatatttttccaaagcattctctagtaggtgttgctgttatctcaaagaactactgatttctgtagatttagctctgtaaccattcatcttactgaactacattcctgatcattttccagtgaatatttttggatttccaggtcctatcacttgcaaataacaataattttgtctcttctttccgactactttcaattccttttctttgttctgtctcatcttcctgtgtgttgagggaggcttgggcatgatttcagtctcaacagttatagtgacagaccatctcacgggttgtcatttgcatgggtcagctattttgggttgattgattttaacttcataagatcatcttttctcaagttttatgagtctcttattgtacctttgaatgcacacattttatagactgtggagattaacctaaataaattagtataattgtaaggggagattgaacaggaagagtttagggttagggcttatttaggatttgcgtttaagatgaggattcacacaaatgtcatgtttaggagatttcacttgattacagctcaaatcatggacaatcaaggtagagtcccttggtcactcttttagctagagatgctaaaacaaaataccatacaagggtggcttaaacaatagacacatatttttcacagttctggaggctaggaagtccaagatgaaggtgctgcaggacttggttcctggtgaggtctctcttcctggcttttagacagccaccttcttgctgtgtcctcacatggtaacatggtagacagtgaacttgctcttctttttttttttttttttgagatggaggtctcgctatgttacccaggccggagtggagtggtgcaatctcagctcactgcaacctctgcctcctgggttcaagcgattatcctgcctcagcctcccgagtagctgggattagaggtgtgcaccaccgcgccctgctaatttttgtatttttagtagagatggggtttcaccattttggccatgctggtctcaaacttctgaccttaggtgatccacccacctcagcctcccaaagtgctgggattacatccatgagccactgtgcccagctctttctcttcttgcaagggtactaatcccatcatggggcccgaccctcttgatatcatctaagcctaattaccttccaaaggtcccacttcaatatcatcatcttgggggttagagattcaccatgtgaatttaaagggacataaacattcagtccataacattcagctcacccttgggcttcattttctgtaatttgatcagactgaacagtagattggactttgtttactgcccatcgatttactgcacaacgtggatttatgctcattgcctgccactcttcccctctggttgctgcttcaagactggctccattttccctacagctgtgacaatgcactatgttcagtgccccattgccctttaggaagtcttttgctcttttgttaacagttgcttaattcaataagaattaagggtaaacagaatgctgctatgctttatgtgccctccatgggagttaggagtctgcagagaggggatgatgatgggtttgggctgaggcatgtgttggagggcacctgctggagggcaaggcttgatcaggctttatgaataaaaccgccagaggattgttaaagtagagccactgttcttgctctctgccctgtaaagctgatttgaatatgaaatttttgccccccaccaaaaaaaaagctaaccactcattatattatatgcctgtgcttcaggctttctctggcatctgacggtttaaagagctactaccatcacatggaccatgacagctcacaaaggagagagatgtacttctctgttagtgcttctggggcttctactgggggtctttcttgtagcccccaagctaagtaagaattttctaggctacctacagcatgaactatgttgttagatgttgtcttgttcaaagccaggctgagtctttgatttaatgagatggattcctgcacagaaatgcctagactcaggtgaaatcacatggtattcgatgtaactaggaggagtccatgccttcctgctgtattcttcctgctgtattcttatgtgaaccttactgatgccaaaaatattaggctggctgctttcctccctctgctgcagccaggccacctgtacccaggccttctaaccaagcactgtggtttgggaaccacacatgcggcatgtctggctctagacaaaatcacttgtggctgactctgtaactcttgacaggtgcaaaggcttagacagtgctaatcctgagagctaacactgttctatacctggatactttcagtgaccatccctccaatatcaccacatcatttcctctttctagtatattctgtaacaaccagagtaatttttaaaaactgcaaacctggtcctatcatcttttccatgcttacctcccctcaaacttcaacattctttaatgtcttaactgtgctcataggataaagccaatttcctctgtgtggcacccacactgccacctctcctcttgttctggaggcttctgatgttcctgggatgtgctctcttgcccgccccaacatcaagatgcttgagtctgcttctcaatctcaccctgcccctctttctctgcatctggtacttcctatcatcttagttctgagctgacctgttactttctggagtagttgagggagaacgaactgatggaaagacaaacccccaaatcccggtgcctgaacccagtagaactttatttcttgcttgcagcagaatccaagactggtgctccagagtcatctgcattttccatgcgggaggctgtgtcaaaagtttctgatgggttaaacccagaagtgactgattgacattgattccactggctgggagaaaacacctggtctcgcctatgtgcaggtgagcagggaaatgcagtccacctgtgtgctcaggaagtggaggaagcagatttggggcatcactgcagtttctgccacagccccctcccctcacaccccaacccttcccacatacctactcacccgactcacctaaggtcctgttcctgatggcacttattacaactgtaattcacaggcatcactgtgattgtccagtcaatactcgtctcctccatgctgctccatgaggtcagggacacccgttttaccagcggttcaggtgctctgtaagaacttgcagcaagaatgaataaatacatccatgcccacatttgtggcatgcactctacagaaatcatctttcccagtgtatttgagggcagaggtacataaaggaaccctaatgttttcattcagtaaacagtcaaggaagaccttgatctggtcagagtccaaagtcagccggtatgcttcagcttttcattttcctctctaaggagggtgttagaaagccactgcactgtagattttcttgtcatcctagtttacaatggctagacatagagtggaattcaggacagataggcaccaagacacaggtacgtttctaggcctctgtttattcccccaaaaagctgaacaaatccccaagcctatggtggtcttgaggtcaacaggcacctgaaaactgcaaacccaggatcctactttattccatgctattctttcttttacaggctctttgcaacctgcaacttccacctcctgggttcaagtgattctcctgtctcagcctcccaagtagctaggattacaggtgctcaccaccatgcccggccaatttttgtatttttagtagagatggggtttcaccatattggccaggccggtctcaaactcctaacgtcgggtgatccatccacctcagcctcccgagtagctaggattacaggtgctcaccaccatgcccggctaatttttgtatttttagtagagatggggtttcaccatattggccaggccggtctcaaactcctaacatcgggtgatccatccacctcagcctcccagagtgctgggattacaggcgtgagccaacatgcctggccatgtcattctttctgtatagaacaaatgcctgctgttagcctaccctcactgtaggcagtggactgccctgggcttgtggtcagccagcctagtactggagttgtcctgggaaagaagcacaacttcctctagccgcaaccttcccctctataaaatggacataactcccaggatggtagggagggattaaaagcaacctatgtggagctcttcctgtgtatcaggttgtggcaagctattaagggcttcacacatattatttcattgagtcttaatagtcttaaagaggatgtactttatccgcattttacagatgagaaacctaaggctcagagaggatgagggtcatgcagctattgagagatgaggttgaattctgcatctgggtttgacttgagagcctgaagtctttgacaccctattcatctagtaggaggcattgaacaccaatgtgttttgtaacttacagtgcttcctatccatgtggggcaccatttgggttctgtaatctccagtgcccccatgatgcctctcatgattcaagtcctttggggatcctctgcctctgcattccaatagtgatgactgtagacagaataagacccctaaagatgtccatgtccaaaaccccagaacacatgaatatgcccaaaaggacttcatggatgtcattaagttaaagattttgagatggaaagattgtactggattgcctgagtgggttcaatgtaatcacaagcatatttcgaagaaggaggcaagagaggatcagcattggaaaaaagggtgggaggaatgtgctttgaggatggaggaaggggccaagaaccaaggaatgcaggtggcctctagaaaaggaaggaacagattctccctaggagtctccagaaggaacacagccctgccaaaactttgatttttaccttattataatagacacattttggacttctgagccccagaactatagcatagtaaattgtgttgtttgaagctactaggttcgtggtagcttggaaattataatgcagtggtaatttctgtgccatgtctctagtaccttaatgcttggtgtggtcttgcagctcacctgttatgcatgcactgattactatcaccccagctcacacagcatccctcgagacagtcatccagtacatccctctctgtgaggacactgcagatacagaagagctgatgaaatgttttctggtctttaaaactgtggtacggtggtgaggctactgagatggctggcagatcacactgtcctcagccctggtctctgggaatgggtgggatctgcagcaacatgattataccacagtctctgtaggacccccttggacagggaggtgccaagggctgaggcgagccagcagcatcgtggttcgtcagctgctgtggcctgacaaccgtgggtgagctttggaggctggcctgtggccagcactggccacaattttctccttgttcaggtgttgctcaggctctttcgtgtgatttgtttgcaaccaagccagcagcctctgcaaccccaggcacggagccaacccaataaatctggctgccatgcaaatggctgtgccattgcagagctgcaggccgagagggagctgtgaagactctgcaccatttgtattcctgcctgaaataccatgccattccctgcattccctggccccacttctgtcaagctcccaggggaggagctgcccatccacccagtgtaaaggaccggtggggtggtaaagcagaaagtgggtgttctatgactttgataacctccttgtgggtgtgtgaaggtgagggaactccgtgggacagtgattggagttgttgggtcccccttttcgattgtcttggtctcaatgaacaaaggcattcttcagctcctttctgaatgcctggctcccaatccaggtctcatttactcagtgcctctcacccacatctactggctccctgatgtgttttcatgtttataaatcaaagagcgtgaatgttgctagctaccttagggacctcatccagccctgcattttataaacaagtgaagcaaagctctgagaaatggagcgcttgcctgcaaccacaggtcaggcccaggcatagcatccttcagggccagtgcataccctgatgcagctgaaccctcagcaaggctgctgccacccatctgcaactctccaccagagatgggaggctgtgttttgtccatctaggccctgagacgccccttgctggctaggttgcccaatcacttgcttgaattccctgggaatagacatggaagaaagagcaaaagcaaacaaacagtggcccactccattgctttttcagtgtgaatttcagaagagtggaggggagggatgtggccattaggatggaatctcagcgctttatctgacacccccagtaacggtggcttcaatgacagggctcatgtgtctcatctgtaagagtctggattagcagcagcttcctggtattaggaccagaacttctaccttgtctggccatctttaatgtcctgccctttctctcatagtctgagatggatcaccactgcattcatgtccagccacaggaaggggacaaggcggtggacaactgggagtatggacggagaagagcacagtctctgcctcatgggccatcttttgtggcctaaactaggtagataggcacacatgtggcctgagttccccagacggttgacacctgtccaattctcctggtgctgtgtggcctggagacatgtgattggaatggcagaagatggtttccatccatgcacgcatcttcccagcactcatccttccagctaatgctgatgcatctcctagccagcacacagggcagctggaagtgattggcattcctgccgctcagcaccgttcctggccaatgcctggtgggacttggaggataaatatcccagctaacttgctctctatgtgaaatcactctgaggctgtactgttctgccttccagagttctgttgtaggggtgagccccaggtcacacgcagtaaactgctggagggtgcactttgcatgggctttgctctgtgtctcacatgctcacttccctcctgatactccccagaaaacctcccaaacaaaccacttatatttaaatgcttgtctcaaggtttgcatctaggagaacccatcccaagacatatggcaaaggagacacgtgggcatttttagctaaaactccaggttccaagaattctggaccatatgcaccatatgttttgtttacatcttatgtttcacaacctcgtttttttaattaagaaatcagcctcttaagatataagtgggcagaaattaacttagtttttgtccatcaagagttatttcctttccttgaaggaaaagcttccctacaagggaaggaaggtggagtaggaggacccatctgctctgtgttggaattcatctaagtcctggaagtacgaagacgagagagacatggtctctactttctctggaagcttcattcaaatgggagacttaagagacatatatatgagaggtcagctaagagcatgagagaaaaatgcaagatgtgtcgcagtgaagctcacatttatgaaaaagcaaatgtgtccttgagaaagggacaggactccatggatagctgggaaggcagaagcttctagaagaggaccagagaggtaggaggaggagaaaggaccctcagcccaagagtgagggtctcagtgtctatcacaagatcacgtgctgctgcgtcagcctcacctatttgatcacaggcatttcagccatgaacccctctcttctgcctccttgggaattgtatacgaactctccctctgcttttctaggctggtggaacatgcatttcggtggcttcagggactctgctttctttactgatttgcatgtgtgacttggtgctccactctctgggatacgctgacatcttgaatctgcttctgcatctcaggttaaaacagggatgtgctctgtgcacatgttcatcccctcccttccctgtgccacgttacccatggcctggcccctctctgtcttcctgatgcttgcctatttgttctctgttgaagaacttcaggttccaagcattctggaccatacgtaccatggtttgtttatgtcttatttttcacaacctcttttttttaaattaagaaatcagtgccttaagataaaaatgggtagacattaacttagtttatgtctatcaagagttattccctttccttgaagggaaggaaggtagagtaggagggtgtgacccaactgctttgtgttgggatccatctaagtcctgaaggtatggtgatgagagagatgtggtctctatttttttctggaagcttcatcccagtgggatgcccattaccctcagaccattcatggaatggtcctcactccctgagaacaactctgtgtttggtcacctcagtcaccttgaagctctctgtccttgggatagctgcttcccaggaggctccctgatgccttgtgccaatgttctttggtggacaaaagctctcagccaccctggctgcagagaggcatgaccctatagcctgcaaatagcagagcccacctcccagcacctgtgctagtctaggactgtgaaaagctattctaactaaaatcaattcagtttggggtgaaattgattccactgtagcccctcagcattttccagggtcctgtctttcctcttttcctatagtttttaagtcccatgctgtgattttctagtttcctttatgggcagtgtaacaagctgagttaccatctagatagattacatcatttttaacttgctttaaactggatgctcattctggattgaatcagtcctggggtgtttctcttggcttcctctggtctggaatcacactcattcccaatctgaggtctccccagtggctttccatagggttcatggactctatcattctgtttgtaataagaagtctgacttagtctctaagacaacagttagttcagtaggttgtggggataatgtggggcttagcaggactgtgtgggtcgctctatcctgaacccatatccactagaaaggtccagaacttgatatgctactgaaggtgaggggctggaactgctaactacagttactcaatcattgtaattagttattcaccacctttcctaatatccaggcttcttttcctctctatctagatccctactatagatcccttaagaataatagtcatattgcttggataatcaatgccagatgctgttactaacaaccccaccattcagtgatttaatacacaggaagtattgttctcactcctgtgaagcctgatgagctttgtgcagctatctaggcagctctccatccaggcagtgactcagggatgcaggttctgtcccttggatgactatgtctttgggtcatttgcttctgagagaaagagtttggatgatcacaaaatgtgttagtttctagggctgccataacaaatttccacactggatagtttacacaacaaaaatttattgtcttacagttttggaggctggaagtctgaaaccaaggtgttggcaggggtggttccttctggagacagagggagaatctgttccatggctctcttagcttctggtggctgccagcagtccttggcattccttggagtgtagacacggaactccagtctctgcctccatcctcacatcaccctttgtgtctgtgtgaatcttcttcttttttttttttttttgcctcttacaaggacagcagtcattggatttagggcctaccctaaatctaggatgatctcatcttttgatctttaacttacatctacaaaaatactttttttcagataaggtctccttcacgagttccatgagttagggcttgggtacatcgtttaggggggtgatattcaacccactgcacacgtttgtttgttttattatcatgcctagaagtggcgcccatgcccactcacattccatcggtcagctcaaatcacacagcacagcctcggttgcaagggagggtgggaagatcatcctcctatttgcccagataagcagatggaggtggtgagcacctagccagtctcagacacgtggccagtgttcaaggagtgcttcttctgtgcccgatgccatgctgaggactttgcaaggattatctccttttaatcctcacaagaagcctctgaggcggacacttgtagttatccaatcttcagacaaataaacagaggcacagagtcccttgacaaatttcccaggtcattcatgaatggtagaaccactgattccatctaagcagacttttcagagcctgtgccttttgccccataggatgctgcttctaactgtactgactcctggtcttttatccttgtgggacagttgtcacagcccccatgcctagcctcagatttcctttacttatcactgggggctgagctcgttggaactgagtgcttagagctaagtgctgactgggggctgcctttccttgcaaaagttctttctttcaccctagacactgtctcagctttcttgtccccacagtgacttgttcaaggacacatcaaagactgaaaatatagccaaagttctcactttctggtccagaaactggatgaaagcaattgacgggagtgacaatgcagatgtctcaagttgatggaagcaaatattaacaagttcatctgccaaagaagagaagccggctaggtggagcctgatgttttattcttcaagcacagctatcaactttgagtgagaggatacagaaaatttatttctactttggctgctttcagaactgcatttatcagcagctccagcataatctacatcaagctgcaaagcatcaattggcagcctgtttgaagcagatccaggctaccttgtctgaatagagccacataccatatttgcaagcaagaaggctgtaggttcttggcaggtggggaaagggaccaggttcactttcctattctatgctaccccttctgttctggaaaattttctgctggcttgcagaagatcaaagcgggaaaaataagcttatgtaatttagtacctcattactgattattgatccagatctgtcttgtacacatagcagataaaaaagtaaataatgttttgaaagaaataaagaccaagagaataatgaagctggaggaagggcaaaaagaaggaagaaaagaatcaaaggaaggaagagagactggaagggaagagagaaaagaaacaaagtcactaggtgggaaagaaaataacttccctgtagtttggttttgaggtaggagaaaacatgttctaccatgcctttgataagtacatagttagtggataaccctgtctgccacaaattctggcaagcccactctccgtgtctgcagatgcaacagatttcattctaggagttggatagccatggtcagtttgtgacgggggcaggtgacaccagagagcatgagttgggctctagttcactctgcatctaccatgtccaaggcattgtaccaatttcatggggacagagtgaaggatgcagtcaggcacaggtagtgcttataggttttcttcggtgaggcacaatggcaagacgtggccatctgtcttcaaggagtttgctttttcatggaagtgacagacatgttccttaatgaggtaaaagtggtgagtcctttgagagacaaacagatgaagaatgggaagggggagagatcaatgttgactaggggaacacttgatagagaaatatacgtctcgaagaaagcatagaagttgaacaggtggagatagggaaaaggacattttaggatgggccacactcagaggcaagaaaacacttcttttgaggaatagcaactcttccaggctgggaagtgcatagggagcttggaggggtgcagtggaatctaagtctggagaggtaggtgaaggccaggctggacgacagatggccactgtggccgagctggctaacagctcaccagcctgtcttctcttcatcttgggaacagcctgtcaacactggccagccttcctggcagtgaaatgtggccacgtgcctgagtccaggccagtgaaaccacagggcagaagccacatgagccactttcaagccaggtgcatagaaaataaaagtgctatgtgtggtcctccattctctttatccttgtttccatgatggggaaagagaatggaggatcacacatagcacttttattttcatgcccattagggtgactttggaactggtttaagagggctgttagtatttgaatgtttgtgttctcccagaaatcctatgttgaaatctaatcctcagtgtgacagtgttaagaggtgggatcttggatgggggaggggggtcatgaggaggaagccattatgaatggaatttatgcccttataaatgagacctgagagagctcccatgcctcttccaccacataagaacacagcaaaagggtaccctctatgaaccaggagacagaccctcactggatgcagaatctatgcctagaccttggacttcccagcctccagagctgtgaaaaataaattcctgtatagaagccacccatttgatggcagttttgttttagcagtcttaacagatggagacaattgcagagtcccacaggatggaaagcatccaggtcactgaatggtcatatagaaggcctcctgatgttcaggaacacttcttttggatttaacttgagcaataaatgaactactattgtgtgcatcccagagatttggggacgtacctgttatagcagctagcaccactctaactcatagagttataaatgaaagtgaggtgcttatgttttattaacaggcagtgagaagtcgggggtctgtatcttccagggggtctgtatcttccagggggtctgtatcttccacctagcaccactctaactcataaagttacaaatgaaagtgaggtgcttatgttttattaacaggcagtgaggagccagggggtctgtatcttccatctatcaaggagcacatctgagatggaactgttgccaacccatgtcccatggatgaaataaaaggaaagtccataggttccttattgtggagcctcagacaacaaattctctgtcaccctttagagtggataaacatccttgaatggtgggtcatgctcattatttcaaaaatttcttatttcactgtagtgttgagcatctattattttcaagtccccctactccagcatgttgaaaaatcaatgatacatgagatagagctcttgctttttgaaacatttcagcctaacaaggaagaaaagtcaggatcaaactaaagtgcattacaaagcagggtgtaaacttgccgccaaagaggagcagactctatgtgcagggggaaggtgagcttgcatggtggtaccacacatgctaccatgccagctgccaccagcagctgtgaccaccatggctgtgactatgaacacgtgtccagctcacatgccatgccagatgtcattctaagtgctctcattttttttttttttcatttaaccctgacactgaccctacagattgggaactattatctccattttgaagatgtatataatgccattggttgtattctgtatttaggggctttagcctgtctatgcttttagacttatttggagccaattcttaaaagcataatattcatgtcatggcttaggctttgttttcttaatcatgttcatcatgagtcctgcagacctttagttaatctggtagaccagggtatgtaaagagaagcacattcatctgccaaaggcagaatttccagcaaagcgttacagcatgtaagtgtttagtgcatgtgtcccttgaaaacttgggcagcggcagtactgtcttgataactgttcttcattattatgactctttattgataaaatgatttagcatagaacaaaagggacattttgtttgaaaaatgaagtgcttgaagaactgacctgcagatgaacagaaaattgatgaagatggttttcgaaacacattgttctgatccgaatgctgaattccacccctaccctcttgctgcctccattaattccctctgcatgtctgcaaccacagccgtttactgaccttgctccacagccccactatgactgtgtctctgccctctcattaatttcttccaaccacccccattaaccttcattttctttttagcctctgcctctaagtcagcctaatttttttagcatacacattccccttccctcttggcccattgcctggcttttgtttcttacttgtgaaaacattacatgattctactaagctgataagaatctatcagcattctataccccaaattttccatttccatgtcctgtttccctgccaaaatagctttcaactttttcagctgctcctttgggcacttacttccatatttctaaaacttgcttatgtagctctttcttaatttttcagtttcagatattgtatgatgacttcctacatgaaacatgaggatttgcctctcctcctgatctttcctttcccttattttctcaatacaattgatgttttgatgttttctttattatgtctttgttaatgtaatccacagctgagtcatttaacatactgtcatcgcattttctttcctggagttaataattttctaattttacctttgcttagtttttatgtagttaccactattttaatgctggactttccaccaaaaatatatttttccttaatatattcaaaggtctcaagagtaacctgtagtttccttttttcaaattttttttcagagactcttcctccatcttcatgctccagtagggctctggcacagattccatcctggagtgtctattcattatccttcagggagctgttcagtatttctcctgtcctaggtcatcatatgttcattcctctttcatggttgtctttctcatgtggatggaatatatctttaggatcctgttaagaaaggtgaagaaaggggacctagaaggtattgaatttctgcatttttaagatgtatttttcttaacactttaattgaatgatagtttggctaggtatacaattttagggggtgaacaattatttttttggtttttaatactcttttattagctttactgatacataatttacaagcaataatgatcactcattaaaaagtatacagttttatgattttggtgactgtatacagctgtgtaacggctactactatcaagatacagaacagtcctatcaccctaaaacaattcctcatgcccctctatatttgaacctcaggcagccagtgctctgctttgtgtcactatagatttgccttttccagaacttcatataaaaggaatcatacattacgtagactgttgtgtttaacttcttatttagtatgttttgtgattcatccatgttgttgtgtatgccagtatttcatttcaatttatggcagagtagtattccctagtatggatatcctgtaccatcccttcaacaactgatagacaatttatttgcatccattttgggattttattattcattctgaaacaaacattagcatacaagtctttgtgtgcatatatgtgtttatttcatttctttttcaatgagtggtattgctaggtcatatggtaagtttgtacttaagtttataagaaatggccaaactgttttccaaagtggctgtgccattttgcatttttgccagcaacgcatgagatttttagtagttgcccatccttttcaacacgtggcactgtttcttaagactctgaattgttctttattgtatagcttccattattgctgaagaggaatccaacaccattctcatttccaatcttttgtgccctagtttttactctaaaatacttaaaattcttctctttagccccagttttctgaaaatttacatggattgcattgaggtaagtgtctttcatccatttgtactggatgtttaaaggtaactttccaactggagtcttgcatccttcagttcctggaaatattcctaaattatttatttggtaatttattctccatttttatctgaagtaactttctaaaatatctgttatatggatgttggcttcctggaatgatccttttattttgtttatttttctctcccattttcatctctctgtcactttgtcttactagctggaagatttcttttttcaattttgcctttcaatgcatctgtttttcattttgacctgatatttttagtttcctatgtctatttttagttgcttgaatctattttttttgtaatcacacttttttctgattttatttaaaaagtatctactcatagctattaggatgttaattacagttttttccccaaaagatatattatgctccctgcaacatctctttttttctattttttattttttagagtttgtctttcctttcatgttaaataagtgattctcaactgggttgggagtaggcagatatttcatcttcaatagatatttgtcaatagctggaaatagtttgagttgtcacaactggcgtgggtgctgctagcatctagcgggtggaggccagggatgttgctaagcattttacaatgcacagaatagccccctgtgatggttaatactgagtgtcaacctgattggattgacggatgcaaagtattgttcctgggtgtgtctgtaggggtattgccaaaggagattcacatttgagtcagtggacaggaaaaagcagacccaccctcaatctgggtgggtacaatctaattagctgccagtacagctggaataaagcaggcagacgaacatggaagaactagactggctgagtcttctggccttcatctttctcctgtgctggatgcttcctgccctagaacattggactccaagttcttcagctttgggactcttggacctacaccagtggtttgccaggagctctcaggcctttggacgcagactgaaggctgcactgtccccttcttagttttgaggttttgggacttggagtggccttcttgcttctcagcttgcagatggcctattgcaggacttcactttgtgatcgtgtaagtcaatgctccttaataaactccctttcatatatacatctatcctattagtcctgtccctctagagaaccctgactaatacaccttgccatagcaaaggattttccagctgcaaatcataatagtgctgaggctgagaaaccctgtgcttgtagatgcttttgtgaaatgtctgctgatagttcatatttaaaggcagtgcattccaaagtatctgtgggcaaggcttgctgacccatggcttcaaggtagggaggtttggctgggtctttccattattatgtttggatcattgttagggctcaggagaaatcctcaaagtcctagcatgagtgtgtagcgggaagagtataagtctggcaacgcatgtgctctgaactgaaggggctcaggggtcttaccctttagtgtgtccatttttattgaattctcttaacctcagtgatgcctctatttcagtctctctagagaatgaacttcagcctcatgccgggtggaggtggacagcttgggaggtaactgcccttacacagactttcaatcaatgctcctgtttttgggaacacctgctccccagtgtccccctgagctctaacctctgtccatcctccctgcaggtcattccttctttcagagttgactctgctggttttccccagtagctgccacataccctttaaattctctttaaacgcttatccactgtcagctgctccctgaagtcttagcagatgatctcacctcccatgttactgagcagactgaagccattccaatataaatcctaatttcattcctcttatggacggcgtggcttagcctcatctctcttctcactcctgtttatgaagaaatgtctgttcccttataaagttgccccgttgccctgtgtgccggatcactctcctcctagctgtccaaaaaagctgctccacagttctcctttacgtgagcattccgtttcttccacatcatggtccccgttcttcctgtaaaaatatggtcaagtctactctggctttaaaaacaaagtcattccattactctggtatttactaagactcctgtccttctcctcacagccaattttctttaaaaaagttgtctgcatttctggaaaaaaattacccacctggcatatgagagctggccctcccttccttccctccaaatatcactggtgataatcctggctgaccctctgggggacaatcccagagttccctatcctcttgtcactgtgtttcctctctgctggtttcttctctccccgttattgggtgttcctttcctcctgctcactaatacatggaagagtcgctctgggcaccgcactccccttattccttctctgcgggataatcgtaggcagacccatggtttctactcagttggctcccagatctgcatcaccagcttcccggtttaacaagctcaggttccctatgaggcatacctgagggtaagagccctgtgattttagattatgtgggtatattagtcatatgtgtattttttgcattttatgatgctttgctgatgctttgctattctggggcctggagagacgatcccttccagcgctagcgaattcccgacatagcaaacattttccctgcaaacacgcctttcatgtgcaaaacaataaaagaaagcccaaatcaccaaccacctcttttatcaaacgctcatataccaagccaatgttttctctgccctaaattgccccaaaggtcaggtactggacaactagagaccatctctctagcccagagcctgctgaaattattcaaactatccaatcctaaacttgctcaaacttatctactctgcttcaccatggaaaccatcatgagggctccgggccaggatttccccagcctcccgactggtcctgcatggcatggtgtactcccttctcttgggaactgcgagggaatcctggccacagctgcagcagtgcggaaaaaaagacagaagtcaaaatattgctgcaatggctacgtgcataatggcagagtgcggcatcccctgtcaacctgctgtggtttcctggtgggctcactttgccaggtgtggaaaatagcctctcacctcagagaaaatattcggcatttctacccttcctccacatcacaccttcattttgttctatcttaatttgggaacttttgttttgttttgttttgctcctaagctattcacatacttctgcttgccaaattactctgaaattacattttgttgtccatctgtagatgtagaccaaggaaatatggtctttcactctttttaagttcaaaataaaagcctagtgcgtattctgtgatttagtgcacaaaggagcaagcaacctctttggagcccctcacttgctcacgtgctcattaagctgctcttggatggagcctcgtggcttaggtgctgagtcctgccacacataatagtcacctgggaagctctgtaaaagcaccattgtgtgggctcctccccagaccaattatagggcttgggcatcaggattttcacaaagcttttcaaaggattcaaatgtgctgccagcacagagaactaacgttccagttgggttttgttctctgcttttttgtgcttttttggccaagacttaagtttttctccaaaggttctcagacttcagtgtatattggaatcacctggagaacttgctaagacggattttggacgctcatcctcagcgtttttgattcagtaggtctggggtggggcctaagaatgtgcatttctaacaaatacccagttgatgctggtactgctggtccaggccacttctttgagaaccactgcctaactctgcctaagggtgttcctcttctgggatctgtttctcagagttagggtaatcaattagtctccattttggcattaaacttcttatgttctgggaaacccctcagtccctggaaaaccgggatagtttgtccccaaaaagatatgtctgcatcctaatctccagaatctgtcgatgcgaccttacttgggaaaaggcagagaccccagaccctgtctctgcatatgtaatgaagttaggaatcttgagatgagattatcctgggttatctgggtaggccctaaatccaatggcaagcgtccttataagaacaacacagaggaagattacacagacagaagagaaggtgaccatgtgaccacagaggcatagagtgcagagagacagtcccaagccaaggaatgtccccagactgaatcgagggtaggggtgcttattctcacagcccagtaatgagatgtagatgaactgggaaagatgaaagtttatttctgtaaccagggacagggagaaggccaggaaaatatcaccgggccaactcaaaattacaaagttttccggagcttatataccttctaagctaatgtgtacatgtaagtgtgcattcatccaaagatataagtgattaacttctaatctataactaaggtctgagtcctgaagaccttcctctggagcctcagtaaatttacttaatgtagatgggtccaggtgccagagatgattacccttatcttgtcacctgctaaatcagggaggtttggggagttcccaataaaacttgtttgtgaagatctggagagattcttcagacccacgataaaacttgtttaatcctaaacaggtcctgttaagaattcctttgttatcttgtcatgcttcaaggcccaggaaaggcctgggcaaaactcttggtgggcttttgttacattccagcttttgtataaggacgctggggctttcagccttttttttttttttttttttttttcttgagacagagtctcgctctgttgctgaggctggagtgcggtggcgcaatcttggctcactgcaacctccgcctcccaggttcaagcaattctcctgtcccaacctcccaagtagctgggactacaggtgcctgccaccacgcccagctaatttttgtatttttagtagagatggggtttcaccatattggtcaggctggtctcagactgctggccttgtgatctgcccgcctttgtctcccaaagtgctgggattacaggcgtaagccaccatgcccaacctctttcagcttttagtatttaacttaaccactcagtcagtgccgaaaccgctgtcgtggaggctgcctgctcagctggtagtgagacctggcctgccacaggaatgcagatggccaccagaggctggaagagacaaggtatccattctcccctagatcctttggagagagcatagtcttgctgatatcttaattttggatttcttctgcagaactgtgagagaatgcttgtctgttattttaagccaccgggtttgtggtaatctgtgacagcagctctaggtaactaataccatccctttaactcaccactactattctagagggatattgggggcagtttccacctctcctgcctatcaaaagtgagatgttctgaaatcacgtaaccttcacaaagaccagctgattgactaatgagtctataaaaacacttcccagaaagaacagtctagaaaccaatgaagcacagctaatctgacctattacaagtacggaagactatctacggtaggtcgttaagcagccaatgatgtaaataaaacctctgctaatgttaaatgtgccactttgttttgcaggatgcagcaggccgacagtcataggcggcctgttggaagcgctctgcagcagctgtgctcagggtgcagcgagacctggtggagagagctggtggcttcgttgaggagggatggcaatgttagagcccagtgtggatggcctttccgtgttctgtgaaggcgctggcaactccacagagctggaaaggctgggccatgaacagggctcaccctgtcaactccaagtcacctccaggacctgtggctaaaatgattggaagaggaagggccagaaactcatggaaagctctagaagtgtcagattggcctcgtacagcccttgggctagctccactctggaaaaccaggtatgaatgtatttggggccccggactggggtgctctcttttccccatttcttctggctgtttagctgctgcctctgaggggtttctggctcctatacctttgctgaagtttgagtcatgattttctcttgatgctcgtcttttggactgtttgctgacgtcccactgtgtgaacagtcttcttcaggttgcccgtacttagtgtccagcgtatgctgtgatgtattgtacttaaagaaagctcctccgttgtctgataagaatatatttctgcatacagagattacaaattattttattattttattttattttattttattttattctattttattttttgagacgggtctagctctgttgcccagactggagtgcaatgacgagatcttagcttactgcaaacctgcaacttctgcctcctgggctcaagcaatcctcccacctcagcctctggagtagctagcaccgcaggtgtgtgctaccacaccagtctattttttttttgttttttttagaaacagagtcttgttttataaacaggtgggcctcaaactcctgagctcaacagatctgcccgccttggcctcccaaagtgctcatggattacagccatgagccaccatgcctggcctaaaaatttttttaacagtttactctgcatgtaataaagcagtcttgaactgggagacttctaaccaaaagtgctaagtagctcaggtcatagcatttacagtgtagctcatgaagcacaaatgaagaagaacactgactttattgttacaggctattataaactctcattccttttaggccaagtagaactgtataagctgttttgtctgtagctgattagctcagaatcatgctgacaaaataaaatcttaagttttgtttacagttaaagctagcattgcaaggaaatcaggatggtttgttagctatgtggctgtgggcagttggcccagaggtatagccgaactgtaacctctgttttctctttttaaatattctcattatatgaatttaaggtttacaacatgttgctttgatgtatgtgtacatggtgcagtcattaccacagtcatgtaaatcaacatatccatcaccttgcatagttcttttttttttttgtagtaagagtaccaaaaatggacactttttagcagtcctcatattgtatattagatttctagggtaatccatcccagctaactgcatcttgatatgcttccatgtctccacattcctaccaagcccccacccctggtaatcaactttctattctgtttgtatgtatttaattattatttttgtattccacgtataagtgaaatcaggcagtattttttttttccctgtctggcttattttacttagcataatgtcctctaggttcatccatgttactgcaaatggcaggctctcttacaaattatttaagggcaagaatcaggctatctgctttttctcactttcaacacacccaggcctctcacatcaccatacaatggaatcttaactagcacaggtttattccatttcccaccattcaaaaactattatcgagtctaaatattattgaaaactttctggttcagctttcaattgaagggggcccccaaatggatctcagcagctggctactaaatgttccaaaacatgaggcaagaggatccacacactgtacctgggagagggtgctgtggtcacaggaaaagctcagtacccggcacctctgcagacactcagtgactttgctgaatgaatgcagcccgagggaatcagcggcacctggtagtagaaatacatagatgcattttgcatgacagagagaatccatttggaaactcaacttttgcagtaatggttgttatgggactcagtttcagagaccataaaagagaaattctaagttatgtttaatgtcatgtccagcccaggacatgacctgaccaaaggcttcaaatgtgtttgaaatctggtgtttcagtctaaaaattcacataaacgttgcattcaattctctagtacttgcactttactcaccagggaaagaaatcactttttcaggaagatgcgccatgtttgctttgtgactttctcactccttcactgctaggtactctagaattcaaggttcgcatgcacagctcttcaatgtgactggctcatagaacaactgtaagtaattgtgttaaaatagtaattttaaagagggagtgtgtttaacatagtttataaaatgtaaaagatgtaagatccagtacatagttctagccacctctacagctagctatgaaggatgatcttagagaataaagtgcttattgctaaaaatagaagcaacctgtcaagatgcaatgggcttttgtaacaggctctgcaacctcttctcaaaaaagtagaattgttagtaggctaaaatgctgtgggattttaatacacaggtttaccactgaagtttttaatttgggatggctaacataaaaatgatcttctatcaacactttagaggatggtttctttgggatttatttataattttactgaaaaattactgtgtagggaagagagagtgactgtttctgaatatcattgaaattacgctatgcaaaggccttaaactggagaaagaagaggagcttaaagagaaaatagaaaacctcccatcgatgggatgattatttcaaaaactaaaaattttgtgtcagtcactttggtgcaaaattacaaagactctctgttggttccttacacatttcaattggatttgtttttggcattttattactcagtcccaaatccaaagggaatttcataaaattaatttgttcacttccccaccaccccaccaacaaaagcccccaaacgcaatgttgtatccaaggatagtcaggcttcctgctgataaaagctgatcttgttcttctagctaatgttctagggaactatttctagaagcttaggaatgtctttaaaacttagaagctcaagtcaatgtcatgtaaatgaaactaagcttatgaaaaattagtttctttctacttttggcaccctcagtaaacactgcagcacagattttttttttccacaatgtctgaccttgggaagttatggcacatgacagaataaaacaaagtagaaagagtattttaaaaatattatgtgagcctgctaactcttggttttaaatgtagacgttggcttctaagcaactaatttttaaaaacttaaagataagaaactaagttttatgaaaagaagtggtacttctgaggttttaagagttaaacttatctgaggaggaagaaatttctatgaatgtgtggcgaaactttgaggggtatttgatataccttctgcgaactgactctcaaagtgacatacaactgtacatctgctgaaaactcctgcccataaggtatatatcactattaagcaaatatacaactttttttttttgagatggagtttcgctcttgttgcccaggctggagtacaatggtgtgatctcggctcaccacaaactctgcctcctggattcaagcaattctcctgcctcagcctcccaagtagctgggattacaggcaagcaccaccatgcccagctaatttttgtatttttagtagagatggagtttcttcatgttggtcaggctggtctcgaactcccaacctcaggtgatccacctgtcttggcctcccaaagtgctaggattacagaggcaaatatacaacatttttaacaggtaaggcaggagagaaggggaggctgtggattgagtcatatttttctcaaagttgtgtccaaaatatgcttctatcagtgtcggtgttaataagccaagcagtcacgtgaaatgggatgttctttcttgcttctttttttgaaacttgctgacctgatgtgttttccacctcaaatttcaagagtcaggtggatttttctttctttttctttttttgaagttcaaattctgccagtttgtatatttttggctggggctcaaaaataaaataggcaggcatttattaaatacagtgacttttcaaaaactgttatttctatatttttatttttaacaatgtgaatagaaattttaaaagaatgcttcatgttagcaagaacgcttacagaatgaaacttttctcaaaaatttgaatttaacaaccccagaaaacactgcattttagcttaagtcaggaatccaaggagaggagaggaaatagagggatgagagaatgggtctgacttgaattctacctcagatgtagggaaacacagtaacagtttttcaaccctttcggcatcaataatcatcacttgcatttcagttcggttcagaaattgtcattcatggcctttttctgggtcttataagcactcagtgctactctgcttacaaggagggcaaattcctcactttggttatgacctttggtctcttccacttcctcactctcactgcttttattttcatttattaaattcacctctgtgtgtgtccacgttgcatgtgcagtattttttttttctagtcttgactttgagcttctagatactgctagagaaagatactcaataatggttgttttgtttgtttgtttttgagaccgggtctcgttctgtcctctaggctggagtgcagtggtgccatttcagctcactgcagcctccatctcctgggttcaggtgattctcccacctcggcctcctgagtagctgggattacagatgtgcaccaccatgcccggctaatttttgtagttttagtagagacagttttcaccatgttggccaggctggtcttgaactcctgacctcaagtgatctgcccaccttggactcccaaagtgctgggattacaggcgtgagccaccatgcctggccaacgatactcaataatgtttattactcccactagaaaattatttcagatagcctcagttgagtcctccttcgtatgtgacatttctcatcagttatcctagttaattccctagtgggttgctcacagtggctaatctgtccctttcctagtctctccaattttcaaacttactttcttaaacctccttatcctctgaaaatcaacttgtgttctacttcactgagaagacatgactatttaaattttccctctctctcagcctgtttcaccccaccagtatcagaattctctacatcgcctgttctcttctcttttagtaatatttcataagatgaaatatctctcttcctttttcatcactggaaaattctcagccattatctctttgaatattacttctgtccaattttccctctttcttctcctttttgggacaccaaatatatgtatgttggaccttctgtgagtatcccgtatgttatttacgctcttaaccatttttcccactatttttttcctctctgaaattcgggtgctattagtttttcctccagttcactaatactgtattctgctgtgtccgatccactgttaaacctatccactattacctaatatttagatattattactttttcaattctagaggtctacttggttatttataaagtagttatttggcaaaattctccttctttttatccactttatgattctttttcttcatttaaataaacatattaatcaaattaaagaccttgtttgctctctttagcttatctgtgatttcactttgattgaaatttttttttcttctgattattggtcatatggtcttccctctttggatgtccaattctccttttcttcgtagtaagtagagactgcagttgttgttctcttccaccaaagagattgttgcttcctttgttaggcagagagggtaaggactaattggcttaatacagaggttgagctgagctgggtgttgagcttcagttttagtgagactcagtctacatctagttcacggctcttctagccttttgatctgagcccatccgggtttctatctcagtcctgaaagactgtgaaagatttcattctgcctttcagaggtttttagcttagctcttgaacttcacacctgtattggtgtctatttctgcataacaaattacctgaagtttagaagctcaaaacagcaaatacttattttgtcatggtttctgtgtgtcaagaatttgtgaacagcttagatgggtgaatttggctgcaggtctctcatgaggtttcactcaagctgttggctgcagatgccacagaatgaagactggactgggactggaagacctgcttccaagcttggtcctgtggctgtgggctggggccttttgtctttttttgctgctggccaaaggcctcatttcttcaccatgagcttctctgagagttcttatgtgtcttgatgacatggtgattcattatgagtgattcaagcatgagtgattcgagagagagagtgcaaatcataatgtttttattacttaggctcagtggttactgtccatattttctgccatcagaaattcctattgatcagaagtgagtcactaagtagagtccaccctcaaggtgaggggaattagctccactgaagggaagagtataagcaaatttgtgaacatactttaaaaccatcaaacctctttatatgtctttcaaaatctgacaaacatcttgagagaagacctgccttgtatttgaggtaaacccctggtaggttttattttttaagtactgagagaatgcaggagaactcactttattgtttagagactgtggcctggctcctccatctcccacatagttccagagctcagcagatttcctgagacctctctcatttccagttggtcacaccagcctcatttgctgctggaagctttgccggttctccggtctctcaacaagggccctctgcctgttctgatccttgccctcacccagacatagaacatctcccagggaaaaatggaggctcagaatggttgccctacatctgatattttagttcatccatttcctattgtcccatagtcctgctttaaaactacgattttataatttattcacctttttgtaattgttgtaataggggcattgccctaccatgacttctacatcttaccctgaagcagaagtctctctgtcttcccttttaaggaaaatgtctctattctttgtcttgtgtctgagtcctcaaagatcctgccccacaaaccatatttatttcccttgaatcttcctttcttcctgttcttttcctttggcttaaaaacatctttatgtcttttctctcttaaacacttttctttctttcttttcttttctttctttctttcttttttctttctttttttttttttttttgagacagggtctcttgctctattgcttaggctggagtgtagtagtgtgatctcggctcactgtagcctcaatctcccaggctcaggcaatcctcctgcctcagcctcccaagtagctgggactacaggcatgcaccactgtgcccagctaatttttgtatttttttgtacagatggggttttatcatgttgcccaggctggtctcgaactcctggatgagagcaatcctcccacctcggcctcccaaactgctgggattacaggcataaactaccgcacccagcctctaaacacgtttttaaaactctgacgccccttaacaccacctcctttcgccccctccccttttactccagtgttagggctgtctttttctccccatctcctacttattacaccccttggcactttgcttcttagagttctgggtaaggtcctcaaatgccttctacatgacaaaatcgagaggcttcttctcagtgtttctcacacccaaacatccagctgcttttactgttaaaattctccccctctggactttttttcagcatttcccttgatgtaacctttctgggtcttttccactttctcttctttttcctcttcttactggacattctctcctaatttcactaaaactcatgccttacacttccatttctatttgaatgacttccaaattttcacctgtagtctcttacctttctctcaggcaacaaaccagatttcaagtgcttatcagatgcctccatataattggctcattattaccctaaacacaatatgttgacctgaaatttaagttgcataacctccatttggccttcaaaactcaagtcatattgctctttcccctggcatcctctgggtcctcaggctgcatggagtggtttggagttggggcggggggaagtttttctctgggatccctgtgttcctccatcaggacagtcatcactgcattgcattttcgttagctgtctctcctgtttcttagagcagtaattcttgaccaggggagattttgctctctgaaggacatttgacaatatatggagacattttctgttgtgactatttggcatcttccacttgcatctagtgagtagaggccagatatgttgctgaacattgaatgatacgcagcagaagccccacaacaaggaatgcctcagtcccaaatgtcagcagtgccaaggttgagaaaccaatctagactatgagcctctcacaaagtggtagcatggttttctgatccgtgtacttggcacatcagatgtactcagtaagtgtctattaaatggaagacaagaaactcattaaatacattcttcccttcttttctacatgctgtgctatcttctcctttttgcttactaaaatcttatccattctttatgattcagctccaatgccagcacctccctgaggtctgtcgtgtttcctccagaattcctctctctatcctctgtgctccgcagcaacttgggggtagcgtttatcacctcttctggagtaatatgtttacctgcctccctggtcacctgagtaactcataagtcccttgtgagcactgttggctaactgctctttttcaaatgcttctctaggctggtatgtgcctcaggattggaagtatttatttcattgttaatgcgtggactcctgttaccaaatggccctcagtcttctctcaattcagagtcctttccatgtaccaggccctctcccctaaaatggtgcagagcccattggatcatttggacctcctgtttgctgtcatttgtggtgtaacactaaatgcctgagaccttcctgtgggctggtaatgccctatagaacttgttaaaaaaaaatcccaacaaaatggtttccaaaaacatcctgtacaacaacagcatcactggaatttatgtctatctttccagttggtggaaaatttttatttcaaagtgtaagtgtcagcatatttatgaaaaaaagcaagcatattgatagtcacatggcttaaagtgtacacccaaaccattacaagcaagtatggccatttatttaacagataatatgatctgggcactaagcatatagtggtaaacaaaaaagttctttcaaagacaggcacattcttctcactgctggcaaattcctgctctttgatggtgaatttgagtttttgaaatgtccagatgatttcaaaatgattggacattttgaaatgtccaaatgggaacaaacaggtcagagttgagaaccaaattgagaattgtctgaaatcattcagagttgaacaaagggggttagtcctaggccttttctgctagttaaatacaggatttaaataaataattaagcctgtatttcttatgaaattttttataaagcctggattatttataaacgagctccgaaagccatttcaatatgcccttatgtgtttcagcatcactgaaacattactttcagagtcaaactcattttgagatataaattctgtcatagtctcattatctctcattcataccttgttttgaaacaagtatgtttaaataccttgtgaagaaggcaatggttcctactctattagcaaagactagagtattcacaagatttgggggaaaacacattcaatatccttcttgcatgacttcttaaagatttctattgcttttaatgatggtctcttttctgcctctggctaggaaccttccaggcattttagagtagattttctgtgcttccaacaaaagcccatcactggggagctaaattacatttagaagctgcatttttattttaatgatatattgttgattgattttgcgctcaatttaatagagtaatcatcctgttccccagtggttctgacatgctcagtgccctaggccagaagccagaatcaagatcctttaagaatagagaagagagagataatcaattcctcactccacaccctgcacccccaccagctgcttgaactcattttcatttggattcctaaattaatgaattgtcttttccaaaatagcaatcccagtttatataaactgatttatactcaatgcacaaaataggtggtgcttgcttgttttgctaaaggaaaggaatgaacttccatggttatgattttattagacactgagtttcccttgcctttttaaaatctgcactcacacacaagcacacacatgcacacacacacacacacacggcaaattgcaattaagaactccagaacatctcattctgcagtgctgggattggattacaagggatattacaattctacataatctcattatttacagcacacattgtattttatattttaatttatttaatatccaaaatgatcactagaagtaaaataacccaccagaggaaagaatgatggagccaggattgatcatgtttttagaccgaggtcttctatgctctttattacaagagtgtttctcaaactcaagtattgtagaaactcctttgaaagaggaaaatcctttttatggatcctcaagggaaatgctagagttaaatgctgccatttttggcggtcagctagtctcataacatcagaaatcctgaggtgaacatgagcatccagccattcagaataatcttgggctttagagagttgacatcaaggaaataacacatgttatataatataaatgtcatcataggagttgaaggatctccgcgaatttatagactccagatttaaaaacacaatgacttaagacaaagagtattttataacttttctgagtgaagatggatgtattagtctgttttcaggctgctgataaaaacatacctgagactgggcaatttacaaaataaagaagtttattggacttacagttccacatggctggggaggcctcacaatcatggtggaaggcaaggaggagcaaatcacatcttacatggatggcagcaggcaaaaagagagagcttgtgcagaaaaactcccattttaaaaatcatcagatcttgtgagactcatttcactatcacaagaacagcccagggaagactcacccccataattcaaccacctcccaccgggttcctccatgacacatgggaattatgggagttataattcaagatgagatttgggtggggacacagccaaaccattatcaagggataatttaccatctttgtgctcacaattctgcagagaggatggatctcagtcttcaaacacaaggaaccaaaaattcaaccttgttttcatgtttatattctaacccttactggatggtggggtcaattaattaaacataagcacaaccaattcagagtttcctctggcacttcagggtctcttctccctctggtggtgtctaaattcaagggtggtgggttcagaaagtgccacagcctgggtgggattgggcatcatgtcctttgaggtcacagtccattcctgcaaactctgagactcccatgttcctatttgatcagggattattggtccactcggagctctctatgtctgctttgtcctgagcttgagccctcagcagatctccttgtcctccacttcagcacctgctgagcagttctcagtgaggaagggacactcttctatgctttggggaactgtggggctgtcccagctgtcacttctgctctcctgcatcaaaacaccagggtgggtggaaagctgaagaatcggtccccagctgggaagtaaggcacaggtcacttcttttcttggaccctcaaactccgccaggaggggagggggaaacttattcctccctcatattagtcaggggtcttcagagaaacagagccactaggatacatacattggtctatatcaatgtctatgtctgtatctgtctctttctatttctatctttatgtacatgtagacatacacagataaatttatttttaaggaattggatcatgtgattgtgggttctgggaaggctaaaatctgcagggcaggctgggaggccagatatccaggtgagtgctgatgtcacagtctcaggattgagttctacagagcagtaggctggaagctcaggccggaattttgtgttgtagtcttgaggagaataccttcctatttgggaaacttcagtcttttaaggctgttaaccgattggaggaggcctccccaaagcatggagggccatatgctttatttgaaatctactgatttaaatgttgatcacaattacaaaataccttcacagcaacttctaggctggtatttgaccacaaaactggcaccagccagtatcgacaagacagggcccagccaagtcaacatgtaacattaaccatcacagggtagacggaaagctgaggaatcagtccccagctgggaagtaaggcacaggtcacctctgttcttagatcctcaaactcatccaggaggggagcggggaaatctatcattcctgcatggcttccctccagaggacgagaaccagcctgggcatagggttccttctcagcacacccactgacccctaactgtcagacttcctttcttgtactccttcacccaaaggccagggacatctgagagttctggcatggggcagaaaaacctggctctccctttatcctatgttcttccaaatctattgtttagggtgtaaaatgtattttccccagcccctccaaatcatggtttctgtgactcaaatagcttttcttgtaaactgtggcttctccaatgagtttcaaaggttatttataagctcaaaagttgagccttgctgccctggttctgcatgtcatcttttctccaggaggggaccctgcagtgccttagctgccacctgacacagggggcgcaccacaggcacaaagagtcactgggtatgaaacgctgagtcaattcattaatggctgtatgtctacaatagcaaacaattacagctttgcactgatgagattgcctgtgtgttctgttcactgggaccagaacttcctccatcactgtctctgcatcttagtcatcttgctttcactggtgtcttaatccatttgggctcctataacaaaataccatacactgggtggcttacaagcaacagtaattcatttctcatggtggttctggaggctggaaagtctcaatttggtgtctggtgagggctcatttcctggttcatggatggtatcttctttttgtgtcctcacatggtggaaggggtaaggagtcactttgggcctattttataagggcactaatcccattcatgagggctccacccccatgacctaatcacctccagtggccccacctccaataccatcatcttggaagttaggattctgatatctgaatgcagtggggaggggacaaaaacattttgtccatttcagctggtggatcactgtccaccacactaaaaaaaagaaaattgaatgaaactgaaggacattttcaaattttcctcaaacctgatgactgggacaagataaggaatattcacaagcattagtttcttcatataggaacagaaattcttggtgatctctggctggcactgttctacttgaatgttttcacatctactaaggccagggcttaatgcatttgcacctctctattcataagcccttttctgtggtttgattacaaagccaaaacccatctattttgtcacttagatcaattattataattatgctttgaaaaataaaacttttgaagcccagacttagaatgaggatctagctgcatcataattatagttagtcctgtgtgtccttgaatgaagtttcaatttgtctcagaaaaatctggttctatgaaatatggcatatcttttaattgctgattaagacctacacaaatcccggaccctatttctttgttcaaagacataccatcttaaataactagtgtagaggtggctcccaataatatttgttgaatgaatgaatacaaggtaggaatatagatgcttatataaaatgtaaaatagttgccaagtctgaggggtacacttgtccatgtggcttaaaccactcagcattgctggcccagatattaccatgtccatctgattcctgaccttgggggctgttttgtaggtgagcaccttgtcagagggtgtagggtgaatgcaaaacagcctctgccaactgcagtagggaggaatgcactggaagtttctagaaccaaagagaaggctggagaatgtggtacagaggaagggcagtatccaaggcaggtgtagcacagcgatgaagcccagaacctgccagcctgggcctcgttgttggcactgtggctaccactggttgcttaatgcccatgctgatacatcctgggggcagaggcccctggacatctgcctccatgtggcagccaccacactatcccagcatctctgggtcaccctcctgaatgtgaaggctggggcaggagcttctctttggcagagtggcagtcccaggcccacgcagtagcagtcaaggtggcactgccgctatgccttccaccgcaagtcacacaatggggtgactccctcaaagtaagaaccatgttctgaatctgagtgagcaaaacccccactgattttcactgctgtgtgcaacagagtcatgaagaaatgtagttttactgaaaagaaaggagcattacaccaaggcaagcaaaattacaaaaccggcccaattttcctatagaactgaagcttgagcaacttgcatttgtttcacctgagttaccttctcaggaaactaaccatcaggcctcccagatcacatcaaggaactgaaacttcccagatcaccacaaccggacaatcagacgcacctgctgcctctttactaactgctcttccttacccctccctaattctctggtatacaaaccccgaattttacttggttatagagatggatttgagacttgcctcccatcttctggctgccgtcacctgcaataaagcctttcttccctggcaatacttgtctcagtgactggctttctgtgtggtgagcatccagacctaggctgaacccctggtattcggcaacaattatgtgaacatcaaattctctgagctcagagttgagcttgtaataagcacttgacaaacaatggttattatttacattattattattttagtatcatcgtttttaatagtatgaaattggccagattttttaaaattttaagtaaagactaactgcccatgggctggttcttggtaaaattttgaagcaagggagtttagccttgactccacgtccttgcattttcaacactctatttacctgcctccttcccatcccaaatttctttccctgtgctgccgactcctctctcccagtgccacagggtattattctttgctggtgatcaactaatgttcactaacatagttaagcctgagagtgttttaaatgccagctctgcagagctgtttgaatttataccacagacgctcaaagatcttaaagcttgcaaggccaaatgagtgaatctttcatggtgacagctaaccactgtaactaggattcattaaatacacacatacaagttgggcactgagctaaatgccttaagtgcattatttcccaggcattaacacttttaattctcacaactctttgaactctttgaaatagtgactattattatcatattaattttcaaatcagaaaattgaggtttggaatttaggcttgaacccagctctgactgactccacagctcacactagatactgtgaactaactacctcatctttagcctagttgcacacattttcagcaccattttctactcaaatgataaagaagataattcaaggagcattaaggagccctaatcttctaaggtgctttgagggcaagcacagtggttcatacctataatcccaacactttgggagactgaggctggaagatcacttgagaccaggagtttgagaccagcctgggcaacatagctagaccccatctacataaaaaaaataaaaatgttagctaggcatagtgatatgcacctgtagtactagctacttgggaggctgaggcaggagtatcgcttgagcccaggagtttgaggctgcagtgagctatgaatgtgccactgcactctagcctggaagacagagcaagatcttgtctctaaaataaataaataaaaataaaatttttttaaaaacgaagtgctttgaactccttgagaccaaagactaatttttattcttaattcttttcttttttttgttatttgataatgaacagttagttatgctgagtcaaatgactctgcactaaacctaacttcagcacatggggacaattccagtggtttaatgaggaattatgtgtctaaaatgcccagagtagagctgaaagagtctagtttcaagtcttgcatcagcaacaaattaagtaaataaatatctccaagtctcgttgttttctttgtagaatgggagaaagcaatgtctatttcctaggtttgctgtgaagattaaagagtacataggaaaaaaaatgattgctgttatacgaggaggaaactgaaatagattttccttgccatgatcaaagatggcagctttttaccaattgtgtcccaaagtgattcagggagagggtcctccccaaatcaccatcatcaattagccactgaattttcgtgtgtgtgtatgcagtttatccaggatgacttcatttaaaagacatccagcatgcctgcttttaaaagataaatcatggaaactctgacctttgtgttctaaagcagcttttatctggtacaaacaaaatatttgaaatgctgagaaagccttttaagtggagacctttgctgcagactggcacaatcagggctgacgactttgttaattgatgttgcagcaagctcctctgaaaaaatcaagttcaaagttagtttgtcaaacaaattttcatttaaagagttgaaagctgtgatttcttcctttctaacaataacagagggattttcatttttttttgttagcaaagtatttgccccatcttttaatatctctaccacccccagcatctctgaggctttgacatggaagttaattctctataggtcaaggcctttgccctgagtgacagattagcttcaggaagcacaaaggcttacaaagagttcccagagatgcagaaggataacgttgggtcctatgttgccggccagggaaaatccattttgctactgagtcttgatgctggagtctgtgtgctgagttgtcacagaagttgagggtaaatgcaagagaacacttgccctttggtcttgctaaggcaaacagaagaatcattgagaaggtgtgagcctgcaggtgtttcattggactctaagtagacctcacctgcctggaagcctttcatgttgcagacgcccatccagttccccaatttcctggatatcacagcttctcagcagccgtgtctatgagcttatttccaagcatctctttggatgggaggttttctgttcctttcagtcaccaatatctgtgcaaacattcagtttgtttttgtttagtgtgtccatttttatccaatagtatgtttggctctgtagggcttctagaatgttccatttggtgatgggtctgttacccacctctgatttcccggactcctgatttgtcttaaatatatcaggcatacgtgagtgcaggtggcctgaggtttcccatgcaatcccatgtctggcaaaggtatggactatggaatgtcccctgttaatggccaccactagcctggagccattccagacacatgtatcacctctcccaggaaggtcagcttctcctccgccctgcatctgtctcccctggggtggcctacagaggcaggtaaaggaaaccgctcttggtgcttggccccgccacccaaagttctgacccacgagtccttccctgcggtcctgctgctgctcaaagcacgcccagtcaacttcagacggaaggaaatcagacttcggactgcagcccagcatatttttggctcaagctagctaagaaccatgaaatgctgatttttacagtttttactttttgccagaagcatgtaactgcctctttaaattatttcagctaacttctgttgatgatctgtggataaacaaaagtgtctgctgaactgaatttgtggggtgctttcacagaaaacaggcatactgtaagtaggaaatctgcattctggaacatctaattaggtaaacctaacggcggcctccataaatatctcccagggagcttgcatctgtgctcagtgcatcagttgcatattaaagagtcatagcttgtgtgagtcgctaaaactacgtaacaatcatcaaggcatgtttggctcttggggaaaatggaaagcatagttttggttttaaaataatttgttttattaagagtgtgtgtgtgtgtgtgtgtgtgtgtgtgtgtgtgtgtgtgtgtgatacgaaaatgtccagtaggtgacctttgttgatctttgttgctgcctcttcagagccctgacttccaccttggactcatctcccttgtaggcaactaagtgaaatctcatgactataggttcttgatattttgctcactaccaggtttagaaaattaataaccaccaaatttctcaacagcttaggatgccaccttttaatatgcaacttctaaaaactgaaaactcttcacaatttgcaaaaatctgtgtcaaatgatggcatgtgggcttcctagagagttgattggaaggtggtggtggtcaggggtgtcttctccaccacccacgtgtgagtttcctggggctgtcgtcacaaatttccacaaaccagggacgtaaaacaacacacatttattttcacaattctggaggccagaagttcaaaatcaagtttttggcagggcctcatgccctctgaaggctccagagcaggaggcgtgtcaggcttctggtgtggctggtggccttcacactccttgggttgtggacacatctttccattgttggcctccttttcctattgccttctcctctatgcctgtgtctgaaattgccataggtgttggcctccttttcctattgccttctcctcaatgcctgtgtctgaaattgccataggtgttggcctccttttcctattgccttctcctcaatgcctgtgtctgaaattgccataggtgttggcctccttttcctattgccttctcctctatgcctgtgtctgaaattgccctccacccttctcttataggtgttggcctccttttcctattgccttctcctctatgcctgtgtctgaaattgccctccacccttctcttataggtgttggcctccttttcctattgcctgctcctcaatgcctgtgtctgaaattgccctccacccttctcttataggtgttggcctccttttcctattgccttctcctcaatgcctgtgtctaaaattgccctccacccttctcttataggtgttggcctccttttcctattgccttctcctctatgcctgtgtctaaaattgccctccacccttctcttataggtgttggcctccttttcctattgcctgctcctctatgcctgtgtctgaaattgccctccacccttctcttataggtgttggcctccttttcctattgccttctcctctatgcctgtgtctgaaattgccctccacccttctcttataggtgttggcctccttttcctattgcctgctcctcaatgcctgtgtctgaaattgccctccaccctcctcttatagggaaacgtatcactggatctagagcccacttggatagtccaggatgacattatctcaagatgtttatcttcatcacacctgcaaagaccctttctccaaataaggtcacactcacaggtctcaagtggacatctcttgggggctgctcccatcaaaccacaatacacaacacagaaaggccactaagtgttgtaactcaatttttgggagatatttgttagaaaaccaaagcctttgacagcaggagtttcactctgcattgacctgacccattttctttcccccaagataatgctttaaagttccctgcatggtggctagaggggggcgctccccatagctctgaaattctctgattttgcacataaaaattggaatttgagggtaaatcgttgaattaggcagtactactcaggcactttttcacttaaggaatgttataagtaaaaatccaaaagaattcctccaaaataatggcatttgtgctctctaaagagttgatggggaagatctttgtggtcagaaatgacttctccccattcctcaaaccacagtgcgtggactcccactgcagactcatggtggccctgccgtggattcagggcaggagtgccccttcctggaggagctgtcagagcggactgtgctcacaaaaacacactcccctgctgaggggtcagcagtgaagtgatggggaggcctggggcagggagagggcagcagtgactacagggcgagatggtattgggataaatagaagaggaagaaccccagtatggcggaacagagggaatgggcccaaccaaggtggggaatgggccctcgcaagggcgaaaatagaagctaagatatagatggaggctctggaacaaaacacagggaagaaggcaaacttgcccttgtcagtactgccgttcagaatttttctattagttgaagtcagtaaagatggtggtccaactggaagtcatactagacttctgtggttctataattctaactaggaatcttcaattagaacctggacttggcagagggaagagcctgcaaagatccagcacaatctgaaatcaaggctcctatttatttgttttcctgtttactaccccacccccttatcagaatggaagctccctgtggtcagggtacttgcctgttacgttcgttgttggatcccaggtcctattcccaatgtttgacatagcaggtgctcaataaatacatgatgtgaaggaatgaatagtgagcacgaggcttcatttatgcgtattttgttcaaatttaactctgaattttttgactttcactccctggtctggtccttcccagagcttttttatctttatttttatttatttatttttttttgacagggtctcactttgtcacccaggctggagtgcagtgatgcaatctcagctcactgcagtctcgacctcctgcatttgagcaatccttctgccttagccccccaagtagcttggactataggtgtgcaccaccacgcctggctaatatttgtattttttgtagagatggtgttttgccatgttgcccaggctggtctagaactcctgagctcaagtgatcccccaacctcagcctccttagagctttaattgcctcctgtttaccctgttggtgagggagggttctctccctaggatttggaatgtggctaaacacacaacacctgacagtggacagatgcgatcgacagcagcctattcctaacatatacccacagcccaagggaggaggacaccatgccacgcaggccatttaaggacagagtgaataaccaggggctgtgggaggcaggctttgtagtaacaagagactgcaatgtctctcggttcctgtgggaggatgcaactggcttatttgagtaattccaccggctggcagggaatgaaactcactactcaaggataagcagtatctgcctggtcccttgataaggagggttgcttggctgggggaccttctctgcaggagcagactggggaggtgagtttgtggtgatgccatctgaggccctcctgattttgacagatgtaaggaaacaaataatacttagctttaatttaaaccttagactatacagagttacaagaacaggacacagagtcagtgcttatgaggtcaaataacctactaagctgtgtgtcttgaagttatgtagcctctctctgcctttctcaacctattaatgaggaatgataataacattcacttcataagctgctgtccaaaataagttgatgtgtaaaagacacttgtaccagccggctgtgttggctcacgcctgtgatcccagcactttgggaggccgaggtgggcagaacatgaggtcaggagatggagaccatcctggccaacgtggtaaaaccccaatacaaaaattagctgtgtgtggtggcatgtacctgtaatcccagctactcaggaggctgaggcaggagagtgtcttgaacccaggagttggagattgcagtgagctgagatcgcaccactgcactccagcctggtgatagagtgagactccgtctcaaaaaaaaaaaaagacacttgcaccttgcctggaattaacacagctcccaaccagtgtgggttatcatgcttaatggaaggagcatagacgtggaagtagacagactcacatttgaggctgtctctgccatgaagtagatttcacttctctgagcctcagtttctccatttgtcaagtgggagtaatgagacatatggaaggctattggcaggtaatggatataaaacacatagcatggcccctggcccctgaatagccatccactcacgtccacaggggttattctattcataatactatagaaatagcttccacttacagaatgcctactctatgctgggtgctgacccaggcactggctcagggagtctaaggccctgggagggtggaggctccagggtgagggacgggatgggtcagggcaggaaggatgttgtagactgtggtgaagaatttggaacatgtggttgtcaccctggggtctggagttatgagatgggaaaatagtgtagaaattattgagacgggggcgtttcaaagttcacgtgaccccaagagatctggccactccttccactgggaaacctgcacatccttcttcccctctgcatgcactggccttggattgatgagagtggctgctgtgggtgtgtccctcaggcttgctgggacagagacagtatggagggctgctgcaatggagggacgtggagactcgggagagtgtgagctggggaggataggtcagggtgtgggtggagtgaacattcaggctgccctgcagaggacagactgcagctgagaaagacctgagagagagagagagagcaaggatggtgtgcccatgtctgggagagacagcatgagcagggcagccaaggagaggatgagaaggatttgtgaccatgcagctctctttccaaccaagggcgtcataccagtgcagacaccttttcttctcaatctgggagaatttcacttctggtacttgtaaaataggagttgctcctgcgagtaattttttgaaaacaaggcgaataaaaatacatatttttgtactgaaagccttgggagatggaaaggatctcaaatctcagatcctgaggagagagggtacagaggtataggtgagaggggttggggacaggggctgcagactgaaaacatggagggcttgagaaatgcccattctgcagtcttcaaggaaatattccaatgtatctccaatagtcatgccatatagcctcgctggggccacagagccattgtagaggttagcaactcaatcccgcagtcagaaagtcccgacaggacatcagatgcagggatgaactgcggtaagcagagctgcagtcaagcaaaatgagggtcagagcagctcactgagcctgggcaaggtggagcgctagagaattccctggcaagcaaggaaaatacatggaaataaatctccctgcaaacagcattgctaattaaaaatgtatccatgccgttgatgatgtggagttttgttgctttatattagtgactataaatgtatttacattggctttcaagcttactgcgctttgaaagttcttaaattcctcaacgtcagattctacaatcaaattctatgacccatgggtctaaccctccagtagcggtgcagggaaatctgtagtatttaagggtttggatccccagaacttagtgatgtacttggtggagagggggctggaggtggctggggcaggagtcaggactgggcacagggaggcagctacatgagttgtgggggcaggggcttacggggctcctgtgggacaggcatagtcacgtgacttggagctggaggcatgtagtcagcaggtcgggctctcccagcaaatcctcttaggtcacagattccacccggttcatgtgttagacgtgcactcacatgggtgccacctttcctagtgggaaacaaccgaatagcaatacgctgatatcagtatcattttctttttttttatcagtatcatttccttttatttgccaagaaaagagatctctgtgttttggaatgagactgggccattttcttgacctggggaagtcggttacctttacttagcttcaattcctcatttattatgtgtggagagtcacctgtgatgcagattaaatgtaagggagtaacatgtacagtctcctagcacagtgtctggggcataacagacattccgcagtagtaatgatcgtcatcaggatcatatagctggttcctttgaaatacctccgcataagccatctataaggttctttctgaaaaaatactagttgatttgaatgtggattaggaaaaggccactgggtttggggaaggtggagatatggccacattctaaattttaatggtatgctcctttgaaaaaggagttccaggcatgacttcctcctttgtgttcatgtatgattgcttgacggtaagactaatgtcccatacattttattagtccacatattggccatcaaggatggggcaagtccttcttactgggtcccaggagtggcatgccttgtggttagcctgtgttccttctctggttgcctcagccccttttctttcttctttctcctgactttttctgggcaggtttctctgagaactaggtagaaagatcacattagtcagaggaaagatgaaaagaaattagtggttacagtcttatagctcacttgggaaatctgtgcccgttctccaggggttttcagctttaatttttctaattcaatcgttttacagtctgaacccgctggcaggcagtgaatttcttttaagattgctgcagcagggagcttctattggcagaaataattttttagtgctataaaaatcttggcggagtttgagaaacatcctggtggtcccagcccatctcctagtgaccactccattaaatccaggaaacaaatccttcatcgactgctatcacaaagttgaaatttattatacagttcagaagtgtaacgattctgggaaatcaagaagaaatggagatgaaattcccagctccacagcataattctctcagtaaatggacacaatcctgcctcttattttgagctcaaaagacagactttgaagatctgaaagtttctattattgatgctacttaaaagaagttggctccaaaatcatcaagtactctgtttgtggaataaatggagttttaatggcctgtggtgccatatgaatattcatgctaataggtattttccatttaggatattaaccacatagtaaccaagaattaattctaatggctggccgttgttataggcaactaatttatgttgattcttgactagaaaaagcaaattgccacatccattaaggacattaaaggaagctatcttttttccttcacctgcaccagcccacaggcagactccccctacatctgctgagcatccaaatgtcttctaaatgtgtttaccagttttatttcaaccagtaagtgccctgttttccatttgctgttactcagttaacaagaaaggaacccaatatggaaaatttagattaagcatcaagagctgaatacttataatccatttaactaggtcctttatatcagaatgaggccttgcagaaggcaaaagaaatcttgttggtcactgttttgtgcagatcagaatgagtgtccctgacctcaagtattgtagacgtcaaagctgactgggtgaggaggatagcctttctttttgcacacttggataaggcaaaagtaaaggagtctcaaggaagaaaataatgaaccatttattttccagtctttaaccaagatcataagaaacttgttgtgatcataagaaaccagccttccctcaaaatcgacatgttagatgtcaagtctctgcttacagagcccggctgaaaagaataatttttctgagagttattcattgagggttctctgcttattttccccttttctagccaagagttatgatctttagtaagaccacctggtggcagaccacctactactaccaaactcaaaaatatactttaagtactctaacagaaaaataaaaaggaaaaagagaaaagcaaaattctaggagtttaatgggaaaccagaatatctttggcatgaaaatattggaaatatattttatatactctagcacagtaacttccctccagctccttttcctatgtaaaattcagctatgatgtagatcagcctcgagatgcctggcctgcaaatgcacaactttggaatcagtacatgcaaatttctccaaaatgctctcgtatttttcaagagaagatcttttcatatagaacagatcatgattaggacataatttgtcatatttcgattctatgtcatgaatttatcttctttgtcatattcctggggtgtgcataaccgttgctcactgttttactctcatggccctgcttatggtaggtgatcaataaatatttattaaatgtgtaagtaaataaatgaatatgatctttatgtagaccacatgctgttgagcataaaatattcaacagtaatggcttgatctgctgttactggagaagggaagaggttgatttctgatggtgcaatggaggatcgcatccattttcatcttacatcctatagcaccacagggtgtttaaaggaccctactaccatcgccaccaatgtcagtggacataggttccaatgatttcagagcccatttcattagagagctttgttttcacacctttccatgttcgataacataggcagcctggattttgtgcaacaaagaaaagcatttcataggattcagttgacaagaactagaacttaaagcatcattccttcccttaattaatagatttaaaaaaatgcatctatgggctagggactctgttttgtgctggggactaaaacaggattaagataggagtctagttctcaaggagggaaggcctgtcattgctcactgtagtttgaggtgtcatgacacaggcgcacggactgcattgggggaattgatccccaaactgagattcagattcagggcccaaatcacgctgtacttagctgccatgtttgtcattatcagcaccatgtctccctctgtgccattgctaatgcagtagttctgcaaagaacaactaaccctggattttctgcaagtttcaatttggtgcttaccaggatgggtcaagggaaaatttctcatggactgtggtactcgtttctatcactaagtgatgcttagcaagtttgctgatgaaaacatctagcggaaagaagcagacggtggcatggctttggaaactccctacattccccacaaaaacaccagagcacaaaactaaaaacccacatacaccaactgagccagagtagggacaggtctgagcccacccccacctacatgtttctccatacatgcctgctgaccatcggacctcctggcatcaccccagctggctcatacccgctgaccagaccttgcaagctgtctaaaaaaactaagctaagaagtatttcaccataaattccactcaggagagttaagtctattgcccacatgtgcacaagaccaggagaatgaccaatccttactctgagcctcattgtaataccttcgcccagggaggggcttagctgccattttctaatcatgcaaaatatgtgttagcatgatttcttactgcatctgcacaccctgcactccaccctgcacgtgaaatgaccctcacctacctcgtgagttatgcatgtcacccttcttaagacaccgcaaggcattcccctggggtgccagccagaggacccttcttcctgtgctgtctcccaatgtatgcccaatgtttcaggcagaagtcttaataaagcttgtctaggaaacttgcttggcctagtgacaatttctgttgcatgggggcctaagaacttgtggtcagtaacacaaccaccatgaaacttagtgagaggagccctgcaaatcccatcatctaagggagcagaatcctggatcaccagatgccatcaccccacctcttctgcaccacatcctcatcccaccaagtttgcctgcctccctccctcccttccttccttctttccttccttccttccttcccccttctgcaccacatcctccccatctcttaacactaacattccctccctccctccctccctcccttccttccttccttccttccccattgtcctctgaagctgaggctgaaagggagtaggagaaactagtatgtattgggccactgctctctgcccagcagtggtacccatgaaaatatctcaaatcggagaatgggattttccagaatctctgtggtttcatctaattttgttattttcaataaatttaatttgttgaacttacataactaaatgttactttttgtatgcttgtaaaacttctcataaataaatccataaaccctaaaaatactcttatttctaaatgtgtaccatggttttggtttgggaaatacagttttatgcaaagggataaatttaaattgaacagctggagaaacaagcttgaaaaaaaattcagcctccaaataagacagaaggatttgatggtgaaatgtacttcaacgaaatttaaaataattgcctatgggctttcgttgtggtggtttgtgttcttaagacattacccagctggagttaaaatgccggtggtccagcgctgtttgcagctctctggtgtgggggcttcttcttcagtttgctgaccccttcccatcggcctgtggactgcgtgaggccgtccaaattcccccttgagtctccccacttcccgcggaatgtcttcagggttcatgatcttggacaaacatgtgctggagatttccaacttcatgtctctggctttgactagtctctggaaatccagccacatttccgaatatctgcaggacgcctctatggagattggaacgatttagcctggatccatgagcatttaacaaaatccgccacggctgctgggagccgatagttccggggaagttttatgcaaaattgagtgtgtgtgtgtgtgtgtgtgtgtgtccgtgtccgtgtggtgtgcatacctatggatgtgggggtgtggggagggtgtgtttgcacagtgcatttttctgggaagaaagtacatagatttttttcagattttcaaagtgtactttggtgcttctcttcccccacagtagctaatgttctaggaatgcttatcttgcgccaggcatcataccaagtgctttattggtattgtatatttaataatttcagtcatcttttgaggtatgatctgttcatatttgtcattttggaaatacgaagcatagtgagattggtaaactccaaggtcatagctaatagacattggagggaaggttcaaatcctgcccttgccccaaggcaagatcctggctcctaattcaagttctccaccagcattgcatcactgggacctacctgtctcccctacttggtcatggattttggtgtttctttttaaaactctgtctcccagacattctcacagcctctcctctagttcaacccccaaatatgatgttagttggcctatggaggctgacccatctccagaatggattattgtcacactggccttcccgccccttcccttcttcctccatccctgcatcatctggggcccacagggtctctaaagcatccatgggctcccaatctacagtccagtctgtcagcaggaggtcatgttactccacggtcagggtcactctgacctttccagacacggttctgaagggctcttcaggagacaccacacatacgcaccaaacatacacacacacacacacacacacacacacacacaccccaaatacatcagacacccccacactacacacacacacactcactcacatacaacacaaacacgccgaacacacgcacgccacctctccacactacacacaaatatacacacactcaccacccacgcaaatgtacatacaccacatcacacacaccacacacacccaccaaacacacatcagacaccccacattacacacacacactcacatacaacacaaatacacacacacctgacactttccacactacacacacatgcacaatcaccacccacacaaaacacatcacacacaccacacaaacacgcacaccatacactgtgcacacacactcacataccacacaacacaccaaacccatagacaccagacacccctcacactacacacacacactcacatataacacaaacacacaccaaacacacactcccagacactcccccaacaccacacacactgtgcacacacatacactcataccacacaccacacataccaaacacacccaaacaccagacaccccacacatatgcacaccacacacaaatagcacaccacacactacacatacacttccacacaccacagccccctaccttcccacacaccctgctcccctataccataccccacatcctacctcccacatcccacaccacatcccaccacacacacacacacacacacacacacacacacacacttttgatgtctctgaggcctggaacctctgccatgtgaggacacagcattcaccccttcccgaggacacagtgttcaaggcgccgtcttagaagcagaggccagaccctgactaagcaatgaacctgctggcagcttgatcatggacttcccactctccagaactatacaaaatacatttcttttctttataaattacatgacctgtggtgttctgttattgcagcacaaaacaggcaaagataattgtcttccctgaatgagtataattgttcccaaatttctcctttttgtaaggacaccactcatattggattaaagttcaccctaagcacctcacttgagcttgattacctctgtcaagactgtatctcaaaataaggtcacattctgaggtactgggagttaggaagccaacatacctcttctgggtagcaggggatgtaattttacccatcacaacatttgatcactctcttggtttctgtactcatcttagggtcagcaatgagcccccgaaaggttcttctttccaccagctcttccttcttcaacatggacaatttacattttcatctgtgctcttatcacccttggtctcctgtagttaagaatcctgaatcgggccgggcgtggtggctcacgcctgtaatcccagcactttggggggcagaggctggcagatcacaagttcaagagatggagaccatcctggccaacatggtgaaaccccgtctctactaaaaacataaaaattatccaggcatggtgatgtgtgcctgtagtcgcagctactggggaggctgaggcaggagaattgcttgaacctgggaggcagaagttgcagtgaactgagatcgcgccactgcactccaggctggtgacagagcgagactccgtccccctcacccccctcaaaagaaagcatcctgaatcgaatcaatgtctttttacagatttttacaggagagctgtattttcagctttgaggtcactgcggggtggttttgttttaattaatttatatttttctttccagccaggctgctgcaagtgcttggctttctggaagaggttttgggatgctcagatgtacacagcaggccagaatttggccatgcgaatggtcttagggttagagatgaagcatgactattaataacaattatcacagggtggctgctcagagtcagtgtcatctgcataatcatctttcacctcagcatctgctcccttcaaatacaggtgtgtgatttttaaagaaccaaatattcagaatatacctttcttctcccccacttctgaggaactcagatcactttgttgtgagatctaacatgattcctttgctcttcataggcacttcatgataaggtggtaatttcatgccttggggaattagatgcagttatagctgtagatgtacttgagttactggaatccagacaggcaaagatgatttactggtagaagcaccacagctcagcaaggagaaggaaatagggccaacatttctgactcttggcttccaacttctaaccatattttatctaggttgatcaactttgaagcacctgtcattgcaatttcagggtatgtgctctaacgcatgtcttctgcaaaggcttcaagtcattttgtttgatgtgctttttattatctattgcatcctgaagcacgtgctgggtgcaaaactctgacatttttggcaaactctgccgttggccgaccagatgtcagggatgccctgtggacaggatccaggtgtgtgatgggctccatgggtctagctgcccttcatatttccagatgagtcctgttgcagcctcgagctgaagataaaacaagggatgcagggaggggctcaggaggttacattttcactaccacttttgagcttcagcaaaggagaaatggaaatgtcagtgagggctgttatctttaaaatatgtgcattctaaggagaagaattaaaaacaaacaaacagaaaaacctaaaatctatgcaactctggatttctttgcaactctaggttccatatcacacactgggtagcttaaaatggtagcgctttattctctcacagttctggaaggtagaagtcagaagtcaaggtatcagttagagacatgcttcatattcacttacccacaaactagtggatgacacattttggccatttggaagatctttattataggagtatgtagattttccatagagtgctgttgtgtgacttgaattttagttgtggccctgcctctgactttgtcagtgatttatcctggttccaggaaataagaatagcctttttctcatgatagtctttggtagtttttaaaacatttgtttaactcaacagatgcaccatgtgcctgactctgctctataccagtgaagaatttacactgtaatggggggaggtaactataaagatgataaacataacatcttaattggagtgagtatgaagatggttgttatcttttcctaaaagaaacaacaacaacaaaacaaaaaaggaagtcaaggtatcaagagggagatgctacctctgagacactggagagaatccttcattgcctcctcctcgcttctggtggtggccgtcaattcgtggtgtttcctggtttgcagctgtgtcactctcatcttggtctccgtcttcacataatgtactccttgtgtgtgcctatgtgctcaattttcccttttcttataaagacaccagtcattggacttaggacccaccccaatccaatatgaccgcatcttaatttgcttacatctgcaaacattctattttcaaataaggtcccattcacaggtacaggggttaaggatgccaacatatctttctgggggacacagttcaacccagtgcatgctccattatcatcacatggaggcatttgtctggttggctttcaggggctctgttataagaatgtaaaatcctaggaaatattgaacgttgtctgaacttggggttttgaggttgcgtctatagtcctcagatgcttttttttttttgatagggataaagaagtaaaaattggaatgggttttggtttctaggaatcaggtgagttgcctgagagatagttacatggggttgatccccagccggttgccatcagaacccgtaaacaccaagttcctccagtccagacaaatccagacccacagctctgtttcacattagtgtcataaaagattttcctgtgcttctgtgtgtggaatcaacatagaaattaaacagtgcatcaaaaatcactgacattttgtaataacgttccttggctttcattgggaattggcaaatctcagaaagaaataattgagtaacttgggtgcttgactcgtgtctatcactcttaggaagggagtgtctgtggtccagaatcagagcctaaggagagcccatctctccaaggaccctgtccatgcggcttctctatgttcctgatattggaggaataaaggggataggtcatcatcttcccaccatgttaagaagccatctgtgtggtcattggactggcaaaaagacaaagagaatgtccatttccatttttgatgcacttgcttcatgaccctgagcagagccatttgactattttggttttgcttctttatttgtgaagatcatgagaaggaagctcacaccaggaaagcccacctttgctgtattccagaaataaataaacgggacttttaaggcaggtttttgaggatttttgtgaatgattctataggtacctcaaaccagctttcaaacatgctcgttaatgttttcagggtgccagggcattattgagtaaattgcaactttagacataaaaaacaaaatatgactgaaaaagaattctaaaaatcatgacaattgtacataaacttaaaaaactaggtcactggaaatttttgaatacttaagatccgctcccattcaaggactttccttacagtcaaattaactggaatgcttgggtcctgaaacctgctttgtagcaaatggtttattttactggatgtttctttatgtaaatatggctttttgcatatataatatttcttcgtagggtaaatgtagtgctcaccaaaacaaccactgtctgggaattttctgtcaactgaaattgaggttgttgtgaattaggggaaatagcttttattgtcactttggactgcagcagggcaaaaaaggaaaacaataagcattgtgaattatatgttttatgctcctattatgaagctaatgatttcctatttactctttctgattccttgataagaagcacctgcaaaggtattgacaaagcttgagccataggtttatgtagaagcccgaaatgctaactttcaggaacgtgaacatattcatttctcacaaatacaaatgaacattggcttcttgtgaagtgtcagttcactggcaggatgcacaggaaaccctgtagttttattttttccaatatttgccccttccaactctgctaggatgaacccttccttctccaggcatcctcaatgactttctgctgcagccccacttctttctcagccccactgattctcagcacagtttcatcttgctactcaggattcagtgctgttcccctgcaaacgtcactgtcgagatgggttcagatctcttgtctcctgcctacagagcaagtacacctcagctgtttcctcctcatcccccttatccttctcctcctcctcctccttcttctcctcctccctatctctcttctaggatcctctgagtataaggtcaggaagttggcaagaaagtgcaagtgccccccgagtgactgggtgagatgacagtctgctttgctgtgtattgtggcctcggtggctgacgctggcctttggtgctcttgctaagctggaaatccaagggtccatcattggtggacacccatatggttctttggagaccgtatggagatctccaactccttagctcccactataggaagtcatgccctcagtttttgcttcatgtctaaaagacccctcttgactgggtatccacatgccagaacaacctttggtattcattcaatccacagggaactcctggattcttgcaacgtctcatgaggaggttcaggctgctttggggtgcccagtcttgaagacctctcactggtcttcgtggaggaggagtgctgctttaccccacttttcctctactccgaggagagctgtggggagcagcagacagagcagtagggtggggctagtggtatctcaggagggagagaggcttatgggggaatcttctgattggctacagggactcattcttccaaggaccccatggcttctaacttcctcatcaggcttgaattgaaacacaccagctacctaaatttcctgtccagagaaatccaataaggctgaaaagactgatgtttttctccttttacagaagagaaaacatcccagcctatgttgcccctccatttcacatttcttcctcacacacgtggttcttgagcatctaggtctttcctccatcatccaaatcagtccttttaatactgagataactatgtcctcgaaggctcctatggttaccttggccttatctttcttcctgaatgcataattcagcactaaatttaatcagttttgtcttactatgtatgcgaagtctactcatctcacttctctaatcagatgatacagttttaaaagtgggaatcatattttccaggacttatagttgcctctttattgagtaggaaatgctgaacatttgatagagtgttctttattgagtagaagatgctctttattgagtagaaaatgctgaacatttgattgggaggggcagctcaaactagtggtagaagtttgagttattctgatctttctctgagtccttctttattgggaaactgtgatgtgcttgaaaagatccataattgatagatgctccccttttcccttatttaattttatgtacaaatgtatgaccttgggcagactcaaccaagtgggggccccattcacaggctctgatggaggagacatcccagttccacctattctgagatccagaaccttaacaccggatggtgggtgacctctcctgttcagcttccttcccagtctccctagaaggggcctctccatggtgccttacagaggtaaccaaggaaaaacttgggaagaatcaaatcatgctagggaagatgtatacacagctggctaggcaggagactttgactataatatgtgcttaagaaaccaatattcctatgtaccctagaatagcctggttctggtactgagtgcaaatccatttccccctgagagttggggccactgaagagaccctgtctctgccctcttctttccactggtgtggttctgcggcgtccttttctttctggccattcactgactgcactggatggacaaccacttgtgttctggctgatttaaaaacggtaagccagtctccagcaattattcctcaaagtactgactctgaaatatagaaagctattcatgaattgtactcctagcttcatttgtgctaagacagaggtcccttaaagtaactcagaggtgccgttttcttccaatgtgagttccgcataagtctcactgccactcctgacctctcctccccaggaatggctcttgtttcctcctggttatttcagtggctgggttggttctagaatccattctggtttttgagtggacgaaagcagaaactggagtcagtgagacatgggttctgacctccacttggctgcccattggaggtatgtgactttggctgactcacctgcactcgcagtatcttcatgatgacttctgcctctgatctttttcatttgtagagagcagaatatggatgttaaactatcaaaggtcccgtgcttgcagcagcccaagaatggggttgaggacacagactgctgttgctgccaaagggctttgtgtccacttatggtggcttacatttgtataacacaccaaaaatcatgttgcttcagatgcaaatatccaaatagtgatgccaatgatgaggaagcctgacatctgatcatacagtatatttatatctaccatgaactgggttgttttttattttacttttttttttttgagagaatgtcataatgtttccatgaaggcattctggttgacatctatgaacttataatgccccctcacttgagtctgaggaaggaacaaggatgcgggatcctggcgagccctccttaaattcaagaggccaggagccctgcctccggcgaatctggtatggtgtacaaaggtagtatcttgaatgcagaggacaaagaggagtggttaggagaagaagcagaaggcatgccagctttgtaagagatagtaatcaacccaagacccaagataaacaggaaaaaaaaaagtaaaaatgtttttaaaaattctcattaagctgaacgcatttgggtcaagtaagtctaagtctttcacaaattgttcatttgggcctaaacccaagagcaccctttggctgaaaatatcaacttgaagagttacttgaaaattatgaaacattagcagtgaaacttaattaaaaatagccattgcttaccatgtgagaggacttcctgcttaatggggacacggtagaggatgtttaaattgtttacagcataaaatttgctttcatcctaatgagaaaactcaaaaacattcagaaaagtaactaaaaaagaaaaagacttaatggtctcacagggcttgggcccatgaatagcctcttctgcaaggagcaactggtcaccccaagaagcaataaaccctcctgaagtgacgagaggggcagcatttccaacgtttatcagcctgaaatttttgttagtatgaatgtcctttctgttaaccctcgggctctctgttaagcaggtgtctttttttttttgttgttttgtttatcaagctgttgattctctttgaggctgaggaggttcccatgagtttgtaacttgacctgaccccagtgtgttaattcctgcaatccagaccctgggaaatgctccctcattaaacaagaccctgctaactcctaagggccctacacagcagcacagcgtattttagataagttaacccttgctttgccatggatccgagagcacagcttctcatctgccgaaggtgcaggctgggtgctcaaagccttgcctggtcagccctgggaaacgcgtggtgatggaatccaagccatggagccccacgcctggctcagccacccatgagtagcatgggggaagttattacagctctccggctctgtgccactgtttcagcatctgtaaaatgaagattgctgtttcataaggatattgggaagatcacatgagataatgcctgggaagggctttctaggttcctggcatgtgataaggactcaatcaatgtgcagttgctgtttcatcactgttttcattccacaaaactatattgagcccccactgtttaccaggcactgggctagaccagtggggggtgccaagatgaatagatgaacccattggacccagaagctccatctggtaagaggagagacaagtagagtagtcagagagctcagggtgaccctggctttgatggaggtttcccggggtactcaggagcatctgtcccagatgtgggctcacagggtgacacctgaagggacattctgaagactgggtaggagttaggcatggcaaagtgttcccaataaagagaagcccttgagcaaaagctcagaggcatggagagccatggtgagttctggagttactgctgcaaggagctggggagttgagtctgtgtagtatgtagagcgagaccaggggaccctgagtgtcatgtcctggggcaacaggaagtcaccaaaaatgtcagtggaggacttatgtcatcagattcccatttcgggagaatggagttttcaggaatatgaaggaggggatggagggagaaggactggagtccaagtggctggttgggagaacactgcattgagagaaggagcacctggccccagcaacggctgcagagatggacaagaaaacacagaaacaagcggcggttgagacacagagtagacagcattggcaagcaaggagctgaggcgtctggaggggagaaaggcattgagacatgttagaatctggcaggtggtacaaggtgaagccttctcaccttgcaagagcagcccctgagacagtgataaggagttctgggtgcttcatactccagcttttgtacttcataagtccatgaccttgggcaagtggttatttgcaagtctgagattcctcacttgtaaaatgggggtagtaacaccttccatgggggctgtggtgcacatcaaacaaaggactgtgtgcactgaacacagagcctggagcctgaggcatggtcagggggcccaagtcaaaagcttgtcatcagaagagtcattatatcgtttgaggacacgaacattgccaggggccagtcaatatcaactgcatggtgatttgaggtttaatcaattgcagttgtggtctccataaaaatgggtcctttgctttgcacacaggaaaaggatttgaatgaatcccaagtgggttactattctgtgcaagctacagaaatagtcagcatgcaagtgacacagataaggcacagtccctttcccttggggagctgagagctggtgagtaggctgagtgtcagcagagagtctaggtttcaggctcacatcactgccccttctactgccattgtctcaggtgagtttcccatgttccctgagtagtgttctccacctggaagagggggatcatcatgcttgctttctgcctgttgggagaattagaggagatacagggcaagatctggcccgtcctggtttaattatcattattaggggaaataaaatgtaatcacaaatggttattatctagcacaaagtgaaaagtgccattagagaaggatcaggaggttcagaggagaaaggggtcatattcagctgagataatcaggaaatggaacttccactgaacgtggaagaaaggcagggattgtggtggcttcacacgttgacttggctacgctggagttacattttccagaattctgctccccttggagggtgggttggaggtgggccacagggcatttgcagaaggttttgaaggtaaaggagaagcaacagctatgttccttcagcccttggaacatagcaacagctatgttcctccaatgcacagggctgggctctgaaactgcctgtgcaatttgtcctcacctgtggctcatctggctgctcagcctccagctcctgctgaatgcccactctgttctccaactcctgggctgcaggcagactcagcctcatgacaaggaaagccagcttctcctgcagaacccccagccctgtcactgaagttgaggcctagaagtgtgagagactagggtatgaggcctaaagctacagcccaatattatgtgtgtgccttcacatctggggaacccagcctaatggcaaattccccatcccacggtgctcctgcagagaaggtgtcctggctaagccgctctccctaataccagagccaggcacagtacctgctattgttggtaggggactctgttctctgcaggaaccatctcctcctgcagaagccaaggggcaccccattctcttgataccacagagcctgcctcccttagccttttcttgttcactcagctcctgggtgaaacccctgtgtggcactgaatggtatatggtgtcctcctcccaacctgtcaatttcacctgttcagtgttggggtgtcctgtgtttgaccaggctcaaaatcctgggcagggaatccctcctttgcctacaaggtgaagaggtgatgatgttcagaacacagccccacgccaggttccagtctgttctcctggattctggctcctgcctgtggcctcactctctcccacttcaagtccctcccctcttcctcactgcctccccgtggactttaaatcccagcaccagacacaaagacgacagccttgcagagaccatttaactagcttccatcattatgtggcatcaaatccctataatcatatcataaggtatcaaatcccatatcataagggatttattataagggaatgtgacctcacacagggatggaagctggttaaacagtcaaggatggaagccggttaaatagtctctctctgtctctcggtctctatcactctgatggttttgttgctcagatctaaccctgatttttatagactctaactggtcaatcaggctgaaggaataacaggatctgaaaaatctaaagatggtgtagaaaaaggctgcttctgtgacaggcgggaatttctcaatccaccaccttcggtgtgctagaaatgtgactgactttctctctggaggcccctttcttgcaaggagcagaaatagagtctccctaattcacaggaagcacaatgactattcagattcctctcccaccaccttcacttcagaggggacacattccttccagggactgacatggcggcttctcagtctcagcaggggagagacgggttttccttggcctcggtaggcattggcctcctctgcagtgagtgttgtcccattggcacttattggttccactggccagtccaccctacccaaggacagtgtcccctcctccattgtctgctgccatatttgattcctctctactctattatgggtcagcaggggcgggggcccactgtgagccttcctcatgcccttggcctcagccttctgagcagacacctgttcctacttgtcttggtgcccagggtagcaggaggcaaagtgcactcaggaccccttaactctaagattgtcaaacaacgacaatccccttggggccagtcattgggtgggttcatggttccttctgagaaaccccatatgcacttcattcttttcatttcccatgctctctcttttggcctgaagagagtatttttccttagaagaagcaagtagttaaaaaatattttcttcttttctttgacctagagcttaacaaaagacaaaactcagatgatgaagtacttaacatcttccttctttctttcctgctgacttgatgactctgctttggagcagtgggggcctcaaggtcgcagtggagaaagccatgggccagtgggaggtgaaacggagccaaaggtgggagagggctcgagggaagaggccatggataaaaggaacaccctttacacagaggtcgggggaagatggccttaggaaaagccatttgatttgatatttgagagatgtttggtgaccttcaagagcatatttttgggagaattccagaaagaaaataaggttgtaaagagtaagaaggtcagtgaagactgtaaggacaggaaatgtggaaaagctcagtatcagccacttacttttatgggatcctagtaaataaagggggagacagacgatggaaactttagggcatatagggaacatttaggtccaagcagggtggaggaaagatatttttagggtgagggagacttgggtatcatggttgacagaagagaaagagcgagagtgcaggagagaccaaacatgtatagtgaaaatgctcaacctcttatggaatcttggctacacttctgctagcttggtgaccctggaaaagataataaacctctcagagcctcacattcttaatatatggaacttttagagatggcaagcctaagtcaaaagctagttttgtaatgttataccatcaatatagcaacaatcatgcatagtgtgcctctacttccataaatatggaacacatatatggtgcttactatgtgtcaggccttgttctccatatttaatgcatatgaactcactgaattgcatgcagttaacatctactaactcaattcttaaagcaaccctaggagcccaatttttaaatgatccctgtcttacaaatgaggcaactgaggcacagaggggttaaataactctcccaagaacatagagaaggcagttgacagggaaatgggcttgacaacctatgctcttaaccactgtacaacactgtctcatgctgaatgagctttcaatataaaaactgattattgattgattgattggctgagcagagaaagatgaaggaaattggtggtaaacaaccacaaagaaggaataaaagtgtagagcaatagaccaagtgaaagggttgacctgtgaagagcaaagaacaagcccaggggaaaatacagaggtgctgggtaacagcaatgctgtttgagcccctgcatccagctgctcctgaagctgataaaatccattttcagacctttggttaagccaacaaattttctctcttgctgaaaccaagatgggctgggtgtccactcacttgcatctgaaagatgattcactaatatgctcatctattttgaagtctggtagcagagaagagaggtggcgtaggctagcaattcatgatggtaccagcctctggctacctccttgtattagtttcccagggctgccgtaggaagtgaccccaactgtgtggcttaaatcagcagacatttattctcttatagttgtggaggccagaagtctgaaatcaaggtgtcaggtcagcagagccatgctccctccgaaggctgtaggtgagaataattccttgtgtcttcctgacttccaaggttgccatgaatccttggtgttccttggcttgcagatgcattgccatcttccctgcttgtcagtctgtgtttccttcttcttataaagacaccagttttattgaattagggcccaccctagttgaaaacaacctcgtctttatttggtggcaactgcgagagcctatttccaggtcacattcgcaggtactggagttagggcttcaacatgtctttctgggaggctctcatgtctattgtacatggccatgcatggcagagaatcattttggtgttttccccttgttccctctatcttccactggcattcaggcagctttctatctcccagccctcaagggaaggaatgatcatgtctaggataaaggccagatttttgatttttgagttccaaagcaggctcttgaaattcactctacagattacagtctaaaaactaaaggatatagatgaacaagtgctggagtttgttgagagacaaaaggattcgtgagtttcagcaagaaagctcagaggcctgaacacagaaagcataaaataagccagaaagctgggggcacacaaagtaagatgcaaatgcagtgatatggtttggctctgtccacacccaagtctcatcttgaattttagctcccataattcccacatgttgtgggagggacccagtgggagataattgaatcatgggggtgggtctttcctgtgctattctcatgatagtgaataagtctcatgagatctgatggttttatacaggggagtttccctgcacaagctctcttctcctgtctgctgccatatgagacatgcctttcaacttccatcataattgtgaggcctccccagccacgtgaaattgttaagtcaattaaacctctttcttttgtaaatggccaactctcagctatgtctttatcagcagcatgaaagagaactaatacacacagctatttacttgcgaagaaaaagggagttcaacgggcaaggggctcagaaggcaatgaggccagaactgagcttgctggggggagtctgagaagagcccttccacccaccatgatttctgcctcctcccagagtgaagactctaatgaggaggagtcacgaagagaggtttggggagctccataaggaagcctgcaagcactgcaaaccccttaagatgggaccagagctcatggccctggggtagctgaaaccacagctgggggaagcaattagccagagaggccacagggtcctgcacatcctagggaggagcaggcctccaaagtggaccttgtgcctggaaggtcagtgtgaaattcaggtgccacggcagacaccacggacttcagcaatgactgtcaaccaagaattctcaaagaccatgaggggtgacttcactgaggcagaggtaactgcaagagctgtaggcagcccttgtgccaggaaccctgtcctaaactgcgtgtaagttctctcccctgcttcccccagaacgtagaatgctgaaaagttaaggagaacagaaaggacaggagggagtgctgcatttggaaaaacctggacaagcagtactctagtgattgctagaaaggattgcttccatgtgggtgtactgtattttacactttcatatgccactagagtccagcagaattgtttcctttacttactgaagtattactcaatataatctggctatggccaagcatggcggctcatgcctgtaatcccagcactttgggaggccaagacgggcgaatcacttgaggtcaggagttcaagaccagcttggccaacatggggaaaccccatctctacgaaaaatacaaaattagctgggtgtggtggtgtactcctgtagtcccagctactcgggaggctgatgcaggagatttacttgaactcaggaggcagaggttgcagtgagatgagatggtgccactgcactccagcctgggcaaccgagctagactctgactcaaataataataatattaataatttggctcttgcaaaagatataacatttgagaaactcaaacttgcttttattacttattattaagtctaatacataagaaataaatgagagcatgtagcaacggcaacaaagactatttaaaaccttaaacatgtttcttttaggctgataacagaacagtttcatttgaagcttaagatgtaaatgctgccatttatacatattggtagaaatcctttagaaggtggctttaattagctgctcttctcttcttttctcctcctcctcattcttaaatagatgtcaatataattaactttattaatgaagctggttaaaatgagctgaagacatggtatcagatcggcaaagaactgcacaattaagcatttgaacatgagtaaacacatgcatatatgctgttgggctaggaattgatttcaggatacacgggctgtcgcccaatcaaaagtgccgtgggagtgtgccttatgctgatatgtacaaatataacagaatgacccttttcagcccaaatgttgagacagtgcttgggatgactgagtgggatgttggctgagacattctccatgggcaggtgttactaagcatgcatggtcttatgtaagtagaataaaagaatggctaacgatcatcattaatgcttattggagaacttgttatgtgccacgcactattctaagccctttatatgtcttaactcatttgataactcaaaatatccctaaatggagtgagttactgttatttctcatgccttaaagataagaacattgagccatggttagtacctcgtccacggtcagaagcttatctgtggtgcagcgcggttctgaactcaacctctggctccagatcccacactcttaagtactgcattttaagttcccttcagggttggtgcacatggggaagtcagtgaaaaagtcttgagatggttaaagaaaagcaaataagccgtctttgggctgttgagtgaaatctcaggattaactgcttgatgaaaagatcctcgtgtgatgtgtgttcagggtctcagagtggcttccatctgtacaacaggaaggctccaatgaagctcattctcccaaatttattgtttttagtccaaagataagcttctgttaactttgtgtgcaatgcaatttatttttggccctcttttgaaatattgtgctcagctcaagtcaacaagctcttgccccaggtgttagaaacatgggccacatcctagcaggaagctgggagcatgaatcagccacaaagaagggcttcacaaaggaaccttaaaaggaggccaaactcaaatttctggaaatgtgttaaaggttccacatgtattctgagatctataaatgtctcatcttctatctttgaaagcccttactgctagtccaaatgtaaatcctcattaggttataaaccctgaaaggattttgtcatcaaagatagtgctaaaattagatgcttcctggctgagcccattctgcttgcttgaagaagccaaattacttccccctctgtgaattcaaagccctgacggattcgcctctccctccaggctgtcaatccagttgaaaaagtcatttgctgagtacctgggtatcagtgtcctctcaggtcgtcctctgcaggggggctcacaagggaagatttgaacccagagcaagcctgttctgactgctgtgggatgcagaggcagtggctatcatgctgcttcccacttccttccccttggctcctgggcagctgcagagcagactcaggctggctcacgtctccttgaaagcatagcagagacttttgcatttcaggaagatttgatcttatactttctcctttactttttgccaagatttacttgcactatgcattgagaagctcagatagtattcagtaagcgtcgccctagataaatcttttttttttttttttttttgggacagagtttcactcttgttgtccacgctggagtgcagtggtgcaatcttggctcactgcaacctccgcctcccaggttcaagcaagtctcctgcctcagccttccgagtagttgggactacaagtgcccaccaccatgcccggccaatttttgtatttttagtagagacggggttttcccatgttggccaggctggtctcaaactcctgacctcaagtgattaatgtgccttggcctcccaaagtgctaagattacaggcgtgagccaccacacctggcccctagagaaacttcacgggggagaataaggaaggagatactcacatttacaatgtcatctactcttattcattcatctacttatttatttatcatcaaatatttattgaacattgaatgtatactaggcactaggataggtacagggatagaataaaagataagaacttgcattaggtagagctccccagaaatagaactcgagatgtgaatttatatgcagtgatttattaaagtgttatcaagataaatcagaaaaagggtagaggaggaaaggttggaaaaattcagactgtgctccatcttgaggccaggaagctgggtttccatacacctgcaattgtcagtcagtccgagtgctatggcaatgccatctattgcaatacagactcaggaagaggggatccaggagcagtggggtcacatgtagttatgagtgttgattagattgagtttgagctttacatgggatgggcaagcagaggtgtctggaggctattgaatgtggactggaagctcagaaaagttcaggctgaagatttaaatttaggaatcaccagaatatagacggtaactaaagctgtgattgaagatgaaatgctaacattgcccagggtgagtaatgcacaggactgaggttgcaactctgggaacatacacctttgaaggtaatttggagaaagaggaccttgctggtgccgggagcgatggctcatgcctgtaatcccagcactttgggaggccgaggcgggcggatcacgaggtcaggagatcaagaccatcctggctaacacagtgaaaccccgtctctactaaaaatacaaaaaattagccgagtgtggtggcgggcgcctgtagtcccagctacttggtgggctgaggcagaagaatggcatgaacccgggaggcggagtctgcagtaagccgagatcacgccaccacactccagcctgggcgacagagtgagactctgtcaaaaaaaaaaaaaaaaaaaaaaaccaaaaaacaaaaaaaaaaaaggaccttgctaatggctcacccctgtaatcccaacactttgggaggccaaggtgggtggatcacaaggtcaaaaaatcaggaccatcctggctaacatggtgaaaccccatctctactaaaaatccaaaaattacctgggtgtggtggtgtgcacctgcaatctcaactactcgggaggctgaggcaggaaaatcgcttgaacccaggaggcagaggttgcagtgagccaagattgcgccattcattgcattccagcctgagtgacaagagtgagactccatctcaaaaaaaaaaaacaaaaaaaacaaaaaaaaggaagagagatctgaggtgatgctctgttctatctcaagacccttcagagagtccccaccagcaacacagctctcactgaatatagccccttgatcttggacttctcagactctataacttggagaaataaattccttttcttcataaaccagtttcaggtattctgttatgagcaacagaaaatggactaagaccgaaggggagatgtaggacagtgtctccagtgagttcagggaaagtgggtggcgtttttattgatgggggagacttgaatgtcttcacacgtgggtatgagataagatccaggtgtagaagggagggtgagagtttgtaaagttgggagcagctgggatccagagtgtggatggagggaggagttatggatgggaagaggcagggtcaggaaggaggtggctgtgaggagtttggtggtgggagcagaacaggaaagatacaccatggcctttgatgtcaggggtgtctgtctgctgagagtgagggaaggagacgggatgggcatttgggaaggtccctaagggtttgcctgggttggcatcagatgtgctggctccccaggagcctcagctggctcagctctggtcacctggttcacatttccaaggatgagaaatgtgaggtgcctgctgcccggtgtactaaggcaggagcagggcctggggagagggagggcctggggagagggagggactgggcacacgccccctacggagagaccctcagactttttaccaatgatggcaacaacagaaagcagttttctgctgactctcacgcaggggccaccagcatgaatttagaaatctactcaagaggatgttcaggtagagctttgcctaaagagaggtttttatttagaaggacctgagggaaggtccatcttttcaacagcagcatgtgagaatttgtgcaacacacatgtagtatcggaaacctacaaataatcaggttggtcttttaaacttccttttccctctaggataaaatgcaaacacaacaataattaggtgagtttaggagtttattaaaaggataaaagtctgccttacacactgagctcacagacatggagaacctccctttttatgttccacgacacatctatgcacactgactttcatgtcacatccttcttaaacagtcaccaattcaccactttgggctgatgcctgtgcagggtgctaggggtacaaaaaataaatggagggcagcctcaacttaccccccaccacacacttttaaggagctcaaatatctgcccagtgaggttggtactgagaaaggtcatctccttgttgggcaagcagggccttagcgtcctcctggtccactcaggtctgtttactgatgtccaaccagatggccttttgtgagacctcctggcttgttaccgaggagctggtgcttggactaagcctctcagtgcagtgttcttcctattaggccacgtcccttgctcgccccaaattttcctgtgatcctaggtcattgaataagcccaatttttacatgctgcggaatggacacgcaaacacatctaagaatggaccttgaccaagacggacatcagaagcttttccagttacttccatagcaacaagaatgtccccttcccaggtgctctgtaactccttttggaagcgtcttcattattcttggctccatgcaaagaactcccagtcctcttcctggaaacgtcagcaccttggtgttgagggtaaacttttgctacagaaaacgtcagcaccttggtgttgagggttaacttttgctacagaagtggacagaatgccatctgctaactcgaagatgatgagagacctttcaaagagtatcaactggagaagagaagtagaagtttcaatgaggaatgttctgtcatcacatgactaaacagaggaacagacacaggattgggttgatactagatggaggtaaaatcagttctagtggctgtatctttctctggctgttgcttcacttggcgtgtgcaaagtgtatctcttagaactgtcatcagtcaccttgctgggctgtgacggaaccacctttcaccctggatggggaaacagatgttgagggttgttggcgtgctgcaggcgtgtagtggatttgtgttctaccaagtgtgagcagtggttgcatggacgactgtgcttccactcagggtgaggggcctggttttccatacctgggggttgaaccaggataccacaccatcagtttgctatctaggaagttgcacctttataagacacttatactttcggctccggaaacagaagcatctttttaatacactgctaaaacatttcttcacagagtagcaaggggacgtcccctctatttagtgaggtggtcacccttaggggaacctcagagaatgaaagattgagggaaacattgaattaattaattgcttgagaataaaacccttgcaggcacacacagcatgatagggaatggcacctctcctttggctgtgatgccctctgatgtccagtgggcttggtgacccacctaggttgcggtctggtccaggactgccatccccaaggatcttggagcaaggacccttgcccctggtgccaccacacacatgaatgtatgtggcaggtattttcttctccatggaaagatgacctcctagaggcagagtccagcactctctgggtgatccagtgctgaagatgataaacattatcttttcttcttagagtggggttgaagtttctgggacacaaagggctttctggctttgtcaagctggtcttgagagatgaaacaggcaccccgcgccatgtgctaacagtcacttttaccaagttttccatttttcttcctttttgatggtgagagattgagaagagagagaaagaaaaaaaataccgttcccaccaaattgcaaaaagtttgtgagtctaagctgtgacttgtccctctggggagtcagggagggagctggtgctgcccatgtctggtttgtgcttgttgaggatggtagaaagcctgggatttatacttttcttgtgagttaccaagctggcttgtctcagtttcatagatgctggcagaaggcagcatcagagattgagaatatcattactcaagttatagcaatgagcgtgagagccatattctcaccagctacccatccctgcagggcccttggggtgaggcagagcagtccagtggatgctgtgtacgcagtgggtttgtgtcatagctgaggagctctaagcttaggaaaccctaaacttttttttttccagtcgacaaatacttgtaagatggctattgtgtgccagggacttttctaggaactatgggcacaagtaaacaaaacaaagaattatgttcttgtgaagctgacatccttgagaggaaagacagacaacaaagaataaccattatgaataaataaattctagagtgagttagatgataagggtatggacaagagctaaagcagatgtggggggcaggaatcctgggggagttgtggcattgaatagggtgctcatggaggccctcattgaaaagatgagcttggaccaaagatgaaggagctgagggaggctgccccagaccacccagattctaggcagagaccagagaggctgtgactcctgattggctgtgtctaatgcctaagaaactctggaagggggttgctggtacacctgcccaaattttgcctcagatggagatgctgtttttattatctaggtcagccaacaaatctgccttctgcccagcaaggagacactatctctatcttccaaggctatctgctatgcaagcatccttgaaaaaacagcacagaacagaaaccatcaaagcctctgctcaagagacaggcacaaatgcaatgacccatgggggatggtctccccacaggtacactgactcccttgatggcactcaggtgacccaagttagcatcaggcctatccagtcttcagtccctgcttgccagggggtgaggagatcagcgaggatcctgtccgcagttgccatctgaccctgctgtagctctggcttgtcactgccacatattcttcaggctactcagtgaccctgccatcacaagtctcctcctcaagcaaacaaacatcccacagcaaacagacacagcttttatgcaggcctgaagattccttcctggcttaaactcttgttagggattacaacagcttggtttccaagacctgcagaaaatctttctttcactgcagccacactctgctgcctctcatggaccactttggaataatgggtggagaagcaacatgggcctcgggtgccctggatattaaactgaggatatttagtctttccaggtgctcctcagagagctgagatactctctaccacgttctttagaaagttaaaagaggacttttatggacaaactgttagtttcctttgaacctttggtgggtaagtggtctataacacactagtcctttggttcccagtcttatcccagtttcagaaggctgtgtgtcattgctggaaattgattcatagagtttcagagcttctctagaaggcctcagccatgtccttaaaagttgcataaaacttttggcatatgagtgattcagggatcctgacaccagaccagagggacctctactgagtggtgatctcctgcttgcgtaaagagcaatttaagcaacagtgtgttttctgtgttgtaagatagtatcaagggtctctgcagcaagggcccaaagatgatgggtggaataaaagcttatccggtgtagctggtaaccagcttcatgtcatggcactggtccatcttttcccatctcaactgttccaccttcttctcttcaagggtagacatggtggacgtggatgcaggatagcaggcatcaggcagatgtgaatggcatggaaaaccaggctcctggagacattgtgagtgctgagtcctgcgaggcttattggctgcgtattaagagaaggccttgcttagtccaggagggtgggcattttccaggctgccagccagatggatgctgaggaggaaacccagtccactgattcaacagctattgtccatgtaccctatagatattgaccagaggatagagaatttatttgagtttcaccattccaacatagaataatctgtgtgcagatttgggctaatacggtgacttccacaaaacaaatcagacaggtagaggtctagaggaagattaattattattactgtcaataacagtcgttttagtatacactaccctttaatctgcagccccttgaagacagcaataatagacccctatctgaactggaaggaggtgatcttttgagacaattgtttgtgtgttaaactgattttaatgagtatttttaaggcaggagtcttgaaagcaatccattctagaggcagacataatgtagaatttttttatttttgtacaggttgagagaaaaatgttaaaaaggtaaacttctatgtttgggggatatagaagttttaggttgatgaaagatagacttttaattttttcccccagaaagtaacatttcttttgcataaaaaaaaaacagtctgagagtatgcaaacagtacacgtcaacacggattacattctgaaaccatggatgcacacctcacattcctggagtcatctaacactagcatcagcaggtggtcttgacatggtcctggacccattctgtgtcactgaatctaagcagacaaatgggcctgcctggaaaataaatagaaggaagaaaggatgggaaagaaggagggagggagggaaggaaagacatttctgaatatgttcccaagatggtaataactggcaccagtctatgttggtggccttaatggaagcctgtagagaatcttcagcctgggagactgagcagctgtggatatttgatcatgttttctggttaatgccaaatctctgacacaaagacctgtttatctttccattttatggaagtgagcctggaatggagtgttgcagccaggggaggattacatcctctttcataaagcaaaccctgtgagggttgtgggataaagaatgcagttccgactatttatgagtaaattctctcttaggatgagccacatgggagataaagtgagggaaaggaaagtaaaaacttagattttagaggaacatcactttcctctggttacagaggattcaggcaatgtttattaagatggtctatcacaaatttgcataccaggcatagtggagataggaaaagtcatggagggtaagatgcacgatcttgccccttgtcacgcaagctggggctacatttcagactccagagcacgggtctggcaaatgtttcctgtaatgggccaggtaataaatattttaggcttcatgggctataccatctctgctgcaactattcagctctaccattgtgccatgaaagcagccatagacaatagcaaatagtgcatgtggccttgtttcaataaaactttatttaaaaaacagcaggaggctggatttggcccataggccacagtcagttgaactctggccatgggcaggcaaggggcagagctttgcgacgggcttcgaatacttgggctggcctctggttgcggtggagaccagcctgcattttgtcctctccagcttgagagcaggagctgcaccttctttgtgcttcctggagattcctgaggagttcagggtgttagtatcgactctggtttattgaattgggctctgggttcaggcctggtgtttccaaacagaagtgtcaatgggaaggaggaccaggccactggcagaagacgagagaagcagacatggaaataaaggcagacaaccttttcttttttatttcgcttagacaaaatgcaaagagtgtctcattaaattaaaaaagaaacaagagagaaaaccaaattgattccccccaccccttcactgacggcactcatcctaattaacaacaaaagaagaccaaattgagaacccggtttctaatgggaaagaaaggtgtgcaaacgtgactgaagttttcccctgcccgcaaatcggtgttccttttaaattcacaaataggctgatttcccacccaccctgttttctttcttgcctcttgtgtgatagaacttccagtcagaaggtttaattaatcccccccatgcacttttgtagaaaatcagtaaaaatgcaatagcctgtgaagatcataaaactggacttctttcccaaaaaatcagatgcccaggcggatggagctcacactcagacagaaaaaaagcaggagagtctttgcactgtctgtggtttcagtattttctcttttttttttttaatatattttggcaattttctttaattataaatattggaattccgtaaaaaaaaggtagctttgattgaattgtttgaattgtatttacaaccgctgtccagtcatgctgtctgttataccagggtgtaagattttgcgtaaggattgtttcctttcaaatggccccgggagtcgagcagtgattcttgggagctgctcattttagctgcctgtcccagctctgctccctcccgctgaggtaatgtggccacggcccccggctgccacgactgtccttctctcgtggaggaggcggaggaggcggcttccatcgggatgggctccaggaccgtggggcgcttcagggtccggcttttctgaggttccaagcatgcttgtcctaagctcaggtccctgctggtgcctggaccacctcggtttaacaaaaagtccattctaaggtatggaggcaaatgtatgaggtcacctagaaggaaagacagggtagttagttggtgtcttcatttggtaaacatgggcagaatgtcctgtgtgcacacgggaagccatgcgggctttagagatgagaatgccgctgcacacaggtgcctttctcaagatcctccttcagcgctcaccacaaagacaggtggaatcgtcctcctacctcctccctgggcgcgggaggagctcattttcctacagtacttacttacttgtattaacttacttgtacagaaatggaggaatggaggtaacagaatccttcaacacaccatcgttgaaagaaaaacatacatcaaaggcatcagtgtccactgggtacgaacggtgatagaccaaaccccgcatgtgattggaagtacagggagagcacagggtttgaggagagagccagggacgccaagcgaagatggacagctggctctcgtcctggcaattctatgaaaccttgtgaccttggccagccacttagttatgggtcttcatgatggctttgggtgaaagcgccacagcttatggccttcttaccaggccctgcctacctgctaacttctgcgtggctcttctgtttcagccatgctgtgtatagagatgacagcagcttagaccagaattctagtgtttctacttcctgcttatggtcactctggcttctgtggtgccacgcaaacataacctcaggtctccttcaagagcatctgctggctgggcacggtgtgcctcatgcctgtaatcctagaacttcgggaggccgaggcggaaggatcacctgaggtcaggagttcaagaccagccaggccaacatggcaaaaccccctctctactaaaaatacaaaaactagccaagcatgatggtgggcgcctgtagtcccagtactggggacactgaggcaggagaatcgcttgaacccgggaggaggaggttgcagtgagctgagattatgccactgcactccagcctgggtgacagagcaagactcaaacaaaacaaaacaaaacaaaacaaaacaaacaaaaaacccaaaccaaaacaaaaaaaccaagagcatctgctgcaggaagggaggcatgtgttctctgggatgctgcaagccaatgacaagcgtgacagggcttttctcatggccgtccccgcccgatgcaggatctccctaacaggcatcctttgctcagggataccccatcagcctcactgcagccttctcagaagtgcaccgcagcctgacgtgcctccaaccaatccctccttcgccttctcctctcacaggtgtcggacctctgttatggtctccagactctccttgccacctcctgcttccttttgcttccttcttcacaagaatttccccaataaattccttgtgtgtctaatctgtcttgctaggcgcttctcaaaaacctgaactgacacagcttctttcaccatcagctactgaaaggtcaccctgacctctcattgccaaattctctggtttcctcttcgtcctcttcctacctgcattactatagcatttgatgccgttgatatttttgttgttggccctttcagctgccagggcactgtggtcttccagatctctgcctacatttctggccaccctttctcactttccttgactggatccttttctctgtctttcctctaaatacggagtgttcagtggcctgctctcaggcctctctcggaaggcttggctgctttcctcattgctttataaataacattcccatctatcttttccattttgctctttctcctgagccctagatgtgaattttaggtgctttgctaggcatttccacacgagtgtccatctggaattctgaaggccacagtctaccaattcagttaatgaaggccaaccccatcccctcccaatcccaaatactgcttctctcctgtgtgctccatcttgtgtaacattatcaccatccttccatccttgaaacctcagaggtttcactgacacctttctctccaggttaattctaccggcaaaatatctcttgactcttttttttttttttcttttttaaacaagaagagatagagtcttgctctgttgcccaggctagagtgcaatggtgcattcatggctcactgtagcctcaaactcctgggctcaagcaaaccttccacctcagcctccagagtagctagggctacagttacataccaccatgcctggctaattattattcttaaaatattctggagacacagggtcttgcttggtttcccaggctggtctcaaactcttgaactcaagtgatgctcctgcctcagcttctcaaagcactgggattacagacatgagccacctggccttgactccttctcattcccatcttcagggccctgtttcaaggctttaatatatcccatcacctccttgcaaagcatgagcacaattagggcccagccaccaggtccactttgcaaccaacactgcctgacttgagctggactgacgctgggtctgagtttctgctgttttggtacagacagtgtgccttatccagcccagtgcttcccactttttgaggaacaggcagacaaggggtatttgtgcagtacactgggatgaacccagggagctgtttctggccaccttgaggtctgaaggactcaccatcttggcacacctgtaactcgtgacataccaggtgcaaaactctgtctagagaatgggctggtggtgtgtggtcctggagcgagggcccagggtaaaggatgtgcagggagagagatatgatgatggtctgagctcaggagcagctgtgggatgtgagagagggaattaaattgtgagatatgaagggggtccaaggaaggtggcttcagagtcaatgacaagtgggagtggtgacagaggagaaggggttaggggtgactccttcccaggctctaagctcaggaaactgtgtggacagtgaaatcactaactgtgaaagggtgtataggggaaagatcgtactttgatgacaaaagatgaagggtttagtttcagacctgctgagtttgatgcagctggggacattcaagacaagatatctagtaggtatttttatcatagaaacgtagctctaggatgactcactgctcgttttctgagtctaaagtaactgaacattcttgtttcttttgcttcaaaatatcccctgctttccttatgttactgtatgctaacaataattaattgagccttcctcatccagcccctttggacccataggccccgaaggtgcaggctgaggggatctgagaccacctgagccaagtgagggctgccattagccagctgctctgctagcggggcaatgaaagtgatatgtgtttagacagtgtttaaagcctgaaccttaggaaacaccttcaagtttacccacagaaaaagaacaaccagcataacagaaggaaaggactattcaagagtataagagaactggcctgtaatccccgcccactttgggaggcctaggcaatggatcacctgaggtcaggtgttcgagaccagccaggccaaaatggggaaaccccgtctctactgaaaatagaaaaatcagctggacgtggtggtacacgcctgtaatcccagctactcaggaggctgaggcaggagaatcttttgaacctgcgcattggaggttgctgcacgattgcactctatcctgggcaacaaggatgaaactccatctcaaaaaaaaaaaaaaaaagtataagagaactaaaaataaatatggccaaatcaagccctaaaaatgcattttatacaatttaaatgagcatacaaattttcaaaatgttattacccgtcttgaaaatttttttccgcgaacaacaggagcaatgaccttatttttgggaaatgcagcaaatgatttctttgtcattgtgttattacattgttgcaccacttgggatttatgattcaaaactccatttagctttttcaggatatctttattctactaagtgatgatgagtagttatatgatttcactgggaatggcagcatgtaattcactaaatgaccccagcgacactggactgggctcactgaaattaaaggcattctaattcaacgttggcttcctactgtcaactggatccaagggaagctcagtaataaatacctagacaataaatgggccataacattttttttttttttgagatggagttttgctcttgtcgcccaggctggagtgcaactcggttcgccacaacctccacctcccggttcaagcgattctcccccctcagcctcctgagtagctgggattacaggcatgcaccaccacgcctggctaatttttgtatttttagtagagacagggtttctccatgttggtcaggctggtctcatattcctgacctcgggtgatccacccgcctcagcctcccaaagtgttgggattacaggcgtgagccaccgcacctggcccataacattcttataggaaggaattacataatttggcattcttgtaaaaagggttttggtaacttgatgcatctgaactttggcttagaaaaatataatggcatgaggcctacccattatagacactaatgtggagggttcaggaatctcttgccatatagaatagctttgttcctgaaagaatttgagtttttaaaactttatgaaacttgatggcattgaaaattactaatgttcgtttatggtagttattcttcagtcttctctaaccagggattatttgcaaaaaaagtgatgaaagcattaacagagctgtcattaagaaaaaattgaataattcttttgtaatgtgaacatccttttgtatgtgaatcaatacaccttaattgaccagtcttgcgatttgtagttttatacattcaatctcctgaaagtgattatgtctttattcctaagaatctgataaacaaattgttaattttattatttatttattttaaattttaaattatttttattcaatattatttttatcatgttgtttgtatatttgaggaaatgggacagacatttacctccagggttctttaaatatataggtcaagaatgcctcatgctctttctgagacccgactcaatcacgaacgcttgacatatttgtaatgtgttgcaacagatttggggataaatctctattttagtgactccccattgaatgcacagggcttattaaacctccacaaagtaatagcattgtggtcccggctggactgcagaatgcgcaggtcttagattggaaggaagaaacgtgtttgaaatcaaaagataggactcataatatctgcatcctgcctgcaggggctcccacttcagatgtagttatcaagagggctccagtcactgaaatggacagatgagaaataaaaatccttcctaatggaaacagctcagtgttacatctttacatgcaatgcctacatgtatttgtttattgcaggtctgacaagtatctctgaatatccaatatctctgattgatccagtttttcaggcaaagctctacaaagttgtgtgattctctaattagctcccttcaacaatgtgtattttctgattagcgtccaaagtagccctttcaactgtgtgcgtgctgcaaatgagttctctcaataattaatgcacttacagagaagagagcaccagagtagtcagcggtaagctctgttattacaggcacttatgttctttaaaaccccagcccatgtgctcatcaacaaagcctctgaggacctggattctctaattgtcctcctatatgcttaagatgcctacacatagcaagacaactcatgcagttattgatccagaaagagacacatgatgtgtgagactgtggtgaccatggggacattggcacagcattccccagtgccctgcctgccatctgcctgtgtcacatgggagaaaccagcccttggctttaattgtggtgatgaggaatagaggccaggataacattgcctgcatttatctgacaggtctagatctgggctcagtttccttatccataaaatgggagtaatagcagaatctagcatagagggctgtggtgaagagtaacttagataatgcatgtgaaagctttccctggattaaggaatctgtttccacagggagcagggccttcttgggtgtgtctggtactccccagctcacctgccccacagcttaccattcaggaccctctccagttctcccatgcagtgaaaagtagcagggatccagaagaagtccaaggatcctttgtgctttgaactccagggtcaccatattgggtcaccatgtcatgggtactcacctccactgggtgcaaatgccctcggcatccctgtgtgtaaatctatcattgccataaacactggcaaaggcaaatgcccagtcttagtacttgtttcagtaaaaccagctatgacaaaattcacttatatttttggcaatgatttccatactctatggtgtcacttcacttcctctgctttgcttccctcaacctttctccacatttccccccttccccttctccctccttctttcccttcctcctgtctctttatctctttctctcattccctccattctttcctttattttccttctaatatagtttggctgtgtccccacccaaatctcttcttgaattgtagctcccataattcccatgtgttgtaggagggacccagtgggaagtaattgaatcatggcagtggtttcccccatactgttctcatggtagtggatgagtctcacaaggtctgatggctttataaggggttgccccattcacttggctctcatttttctcttgcctgccaccatataagatgtgcctgtcaccttccgccatgattgtgaggcttccccagccacatggaactgtgagtccattaaatctcttctttataaattacccagtctcaggcaacatgaaaactaacttccttccttccttccttcttttccttgttttgtttcccttgtgctaaaacttctatccacgaaatcaaaggcatagaaaaggggtaaaaacatgaagcaggggagggacaaagaggtagctgagtgcaataagacagcaagcagggcatacacatcaagaaaagtgtggtgtgtgtgtgtgtgtgagagagagagagagaggagagagatatgggagggaaaatctaactggaagagcagcatactgaaaggggaagttgaggcatggagaaggaaaggactagcgctggtaggaggatccagctcatggtctgacggcaggaggaactgagcttgaactcacttccatgccctccttctgccctgctcacctacctgcccgcactgccggttccttcccagtgagctaaacccagttagtgtctccagcccaggcccagcatgaatacaaaggctcacagagtcctgcctgggcctttgggacagggtccccctgctgacttctttgggctgtaatggtggatttgcacaccatgaacccactgtgctctgccctgaggccaatgcccttcctgtcagagaccctaagtgagggtgagggatggagaaggtggagatggccaagcacagagaagggctctgggaaactgagttcagggactgagatgcaggaacataccagggtcaggggaggctgagatgaataaggctgggggggtgtgagggaggatggatgagagagaggggaagagacacacagagagagagagagggatcagagagatggaaacacacacagggaggcagaaagaaagaaacgtagcactctaacctgggcgatagagcgagactccgtctcaaaaaaaaaaaaaaaaaaaaagaaaagaaacatagctacgcaggtcggtagacagataaaaattagagacagagtcacaaatagagaagggaaaaggggaacatggtaaccatctgggacagtggtaaggagcagtggaggaagagggcaccagaaaggtgagtactatgagaataaatgtgtaccacccactttgaacggcccttgtggagctttaaagatgtgtgcaccatacaaggaccactggcccatccatcactggggcacccatttctcattcttttctcatcagcctcaccaaaacccagtgcagatcacaggctgcacccatcactgcctttctggagggaacccaggcagctgctttgacttccgccttgaggatgagacgctttacccattattgcagcattttgctttcttatttgacatcatgcttcatttctcatccttctgttgctgccctctggggaccttcagtgccattaatgtctccaaaagttctgattaaataggtcagcattgatttctctctctttctctaaccactttgcatactagtatcacaagctcctccttgcctctggtcctgaaatgtacagattccttctgcaggccccacatccatcagcagattcacactcagagcttgtccccctccactaacggtgcattagaaccatggttggcctgactgtgggaaaactgctgaactaaacctgcctccttttagctgaaacctaggaaagcaaaacttcctgaattttctcaatctattcagacacacgcaaggtttgaatgtatttcagttcttggaagaaggatggcaaaatcaatactgaaataacaagaatgaagcaattcagaaaatggatgtgcattccattaatccatcatcaaacaatggttcttgctatggttcttgctatctcccaggcaccacactaggggaaaatatctgaacactagatcagaggctctccactgagggtggctttgtccccaggggacatgtagcaaagtctggagacattttgattgtcataacacaggggagggtgacactattgatacctattggtcagaggccaggggtgctgctcaacatcatccaatgctcagaatagcccctgccacgaagaatgatctggcttcaaatactaacggtgctgctgttgagaaactctgttttagatgatcagaattcataaggccaagtgttccttatttcactttaattctacttataaagcattgaattcaaccaggataagcagttgtacccctcagcctcagaatactagtccacaaggagttacgacctcagttcttcatggaagaaaataagagatggtccaatggaactgtaatcagaaggcaaaacccccaggtctttctccattggcacccgctgaggcaggagctgattccagtggaaagagcagtagttacagagtgcagggcttggtgttgaaatcctgtctctgcctctgcttctgcctccaggtagttttgtgacccttttgagccttggtgctcttgcctttagacaaatgaatgaggcacaatacattctttttttttttcttatatctaaactttttattagcaacaagtaatatttaccaaaagtattgagttggatgtattttagcagtattttcttttctttttttcttttattattttaagttttagggtacatgtgcatattgtgcaggttagttacatatgtatacatgtgccatgctggtgtgctgcacccattaactagtcatctagcattaggtatatctcccagtgctatccctctcccctccccccaccccactacagtccccagagtgtgatgttccccttcctgtgtccatgtgatctcattgttcaattcccacctatgagtgagaatatgtggtgtttggttttttgttcttgcgatagtttactgagaatgatgatttccaatttcatccatgtccctacaaaggacatgaactcatcattttttatggctgcatagtgttccatggtgtatatgtgccacattttcttaatccaatcattgttggacatttgggttggttccaagtctttgctattgtgaataatgccgcaataaacatacgtgtgcatatgtctttatagcagcatgatttatattcctttgggtatatacccagtaatgggatggctgggtcaaatggtatttctagttctaggtccctgaggaatcgccacactgacttccacaatggttgaactagtttacagtcccaccaacagtgtaaaagtgttcctatttctccacatcctctccagcacctgttgtttcctgactttttaatgattgccattctaactggtgtgagatggtatctcattgtggttttgatttgcatttctctgatggccagtgatggtgagcattttttcatgtgtttttggctgcataaatgtcttcttttgagaagtgtctgttcatgtccttcacccacttttcgatggggttgtttgtttttatcttgtaaatttgtttgagttcattgtagattctggatattagccctttgtcagatgagtaggttgcgaaaattttctcccattttgtaggttgcctgttcactctgatggtagtttcttttgctgtgcagaaactctttagtttaattagatcccatttgtcaattttggcttttgttgcctttgcttttggtgttttagacatgaagtccttgcccatgcctatgtcctgaatggtaatgcctaggttttcttctagggtttttatggttttaggtctaacgtttaagtctttaatccatcttgaattgatttttgtataaggtgtaaggaagggatccagtttcagctttctacatatggctagccagttttcccagcaccatttattaaatagggaatcctttccccattgcttgttttttctcaggttggtcaaagatcagatagttgtagatatgcggcattatttctgagggctctgttctgttccattgatctatatctgtgttttggtaccagtaccatgctgttttggttactgtagccttgtagtatagtttgaagtcaggtagtgtgatgcctccagcttttttcttttggcttaggattgccttggcaatgcgggctcttttttggttccatatgaactttaaagtagtttcttccaattctgtgaagaaaggcattggtaccttgatggggatggcactgaatctgtaaattaccttgggcagtatggccattttcacgatattgattcttcctacccatgagcatagaatgttcttccatttgtttgtatcctcttttatttcgttgagcagtggtttgtagttctccttgaagaggtccttcacatcccttgtaagttggattcctaggtattttattctctttgaagcaattgtgaatgggagttcactcatgatttggctctctgtttgtctgttattggtgtataagaatgcttgtgacttttgtacattgattttgtatcctgagactttgctgaagttgcttatcagcttaaggagattttgggctgagacagtggggttttctagatacacaatcatgtcatctgcaaacagggacaatttgacttcctcttttcctaattgaatacccttcatttccttctcctgcctaattgccctggccagaacttccaacactatgttgaataggagtggtgagagagggcatccctgtcttgtgccagttttcaaagggaatgcttccagtttttgcccattcagtatgatattggctgtgggtttgtcatagatagctcttattattttgagatacgtcccatcaatacctaacttattgagagtttttagcatgaagggttgttgaattttgtcaaaggccttttctgcatctattgagataatcatgtggtttttgtctttggctctgtttatatgctggattacatttattgatttgtgtatattgaaccagccttgcatcccagggatgaagcccacttgatcatggtggataagctttttgatgtgctgctggattcggtctgccagtattttattgaggatttttgcatcaatgttcatcaaggatattggtctaaaattatcttttttggttgtgtctctgcctggctttggtatcagaatgatgctggcctcataaaatgagttagggaggattccctctttttctattgattggaatagtttcagaaggaatggtaccagttcctccttgtacctctggtagaattcggctgtgaatccatctggtcctggactctttttggttggtaagctattgattgttgccacaatttcagatcctgttattggtctattcagagattcaacttcttcctggtttagtcttgggagagtgtatgtgtcgaggaatttatccatttcttctagattttctagtttatttgcgtagaggtgtttgtagtactctctgatggtagtttgtatttctgtgggattggtggtgatgtcccctttatcattttttattgcatctatttgattcttctctctttttctctttattagtcttgctagcagtctatctattttgttgatcctttcaaaaaaccagctcctggattcattaattttttgaagggttttttgtgtctctatttgcttcggttctactctgattttagttatttcttgccttctgctagcttttgaatgtgtttgctcttgcttttctagttcttttaattgtgatgttagggtgtcaattttggatctttcctgctttctcttgtgggcatttagtgctataaatttccctgtacacactgctttgaatgcgtcccagagattctggtatgttgtgtctttgttctcgttggtttcaaagaacatctttatttctggtttcatttcgttatgtacccagtagtcattcaggagcaggttgttcagtttccatgtagttgagcgattttgagtgagattcttaatcctgagatctagtttgattgacctgtggtctgagagacagtttgttataatttctgttcttttacatttgctgaggagagctttacttccaagtatgtggtcaattttggaataggtgtggtgtggtgctgaaaaaaatgtgtattctgttgatttggggtggagagttctgtagatgtctattaggtccacttgatgcagagctgagttcaattcctgggtatccttgttgactttctgtctcgttgatctgtctaatgttgacagtggggtgttaaagtctcccattattaatgtgtgggagtctaagtctctttgtaggtcactcaggacttgctttatgaatctgggtgctcctgtattgggtgcatatatatttaggatagttagctcttcttgttgaattgatccctttaccattatgtaatggccttctttgtctcttttgatctttgttggcttaaagtctgttttatccgagactaggattgcaacccctgcctttttttgttttccatttgcttggtagatcttcctccatccttttattttgagcctatgtgtgtctctgcacgtgagatgggtctcctgaatacagcacactgatgggtcttgactctttctttatccaatttgccagtctgtgtcttttaattggagcatttagtccatttacatgtaaagttaatattgttatgtgtgtatttgatcctgtcattatgatgttagctggttattttgctcgttagttgatgcagtttcttcctagtcttgatggtctctacattttggcatgattttgcagtggctggtaccggttgttcctttccatgtttagtgcttccttcaggagctcttttagggcaggcctggtagtgacaaaatctctcagcatttgcttgtctgtaaagtattttatttctccttcacttatgaagcttagtttggctggatatgaaattctgggttgaaaattcttttctttaagaatgttgaatattggcccccactctcttctggcttgtagggtttctgccgagagatccactgttagtctgatgggcttccctttgagggtaacccgacctttctctctggctgcccttaacattttttccttcatttcaactttggtgaatctgacaattatgtgtcttggagttgctcttgtcaaggaatatctttgtggcattctctgtatttcctgaatctgaactttggcctgccttgctagattggggaagttctcctggataatatcctgcagagtgtttttcaacttggttccattctccccatcactttcaggtacaccaatcagacgtagatttggtcttttcacatagtcccatatttcttggaggctttgctcatttctttttattcttttttctctaaacttcccttcttgcttcatttcattcatttcatcttccatcactgataccctttcttccagttgatcgcatcggctcctgaggcttctgcattcttcacgtagttctcgagccttggttttcagctccatcagctcctttaagcacttctgtgtattagttattctagttatacattcttctaaatttttttcaaagttttcaacatctttgcctttggtttgaatgtcctcctgtagctcagagtaatttgatcgtctgaagccttcttctctcagcttgtcatagtcattctctgtccagctttgttccgttgctggtgaggaactgcattcctttggcagaggagaggcgctctgctttttagagtttccagtttttccccatctttgtggttttatctacttttggtctttgatgatggtgatgtacagatgggtttttggtgtggatgtcctttctgtttgttagttttccttctaacagacaggaccctcagctgcaggtctgttggagtaccctgccctgtgaggtgtcagtctgcccctgctggggggtgcctcccagttaggctgctcgggggtccggggtcagggacccacttgaggaggcagtctgcccttctcagatgtccagctgcgtactgggaggaccactgctctcttcaaagctgtcagacagggacatttgagtctgcagaggttactgctgtctttttgtttgtctgtgcagcctacagaggcaggcaggcaggcctccttgagctgtggtgggctccacccagttcgagcttccaggctgctttgtttacctaagcaagcctgggcaatggcgggcccccctcccccagcctggctgccaccttgcagtttgatctcagactgctctgctagcaatcagcgagactccatgggcgtaggaccctccaagccaggtgcgggatataatctcgtggtgcgccatgttttaagcccgtcagaaaagcacagtattcgggtgggagtgacccgattttccaggtgccgtccgtcacccctttctttgactaggaaagggaactccctgaccctttgtgcttcccgagtgaggcaatgcctcgctctgcttcggctcacgcacagtgtgcgcacccactgtctggcactccctagtgagatgaacccggtacctcagatggaaatgccgagatcacccgtcttctgcgtcgctcacgctgggagctgcagaccggagctgttcctattcgcacttattttccattcttgcccttagcaaatcaaaaagacatctcttcaacagataaaggggtgctctcccttgaaatgaggatagctatccacaaagcaggcagcattatctagctgtaattttaatgctacctgaattttgaatttgcctgtacaattacaagtcctaaaaatgcagcaaattattgtcttcttccataagggatgactattcccatctctacaaacagaaaacaaaattctctattcttttgagaaatagctgcaaagtttaacaattttttttcctctgggtcaaggtggcttccaattcttggtttcaggtagcattttgagccagttgcaaaccttcttggattactgcttcttcttcttatgatgtttatcctgtgccgtcaagagaagccattacatgaagctacttaattcagtttcaagtttcagacatgcaccctaacacagcctgccccactagtggtagggaaagcatcagcccctttggatctctgtgctcatgccctctgggccccagacacaaggttatgagtttcagccccttccttggggaatgcatttgaggttgttttttttttttttagtgggaaaaggccactgcctggtgccaacttgttaattcactaaattgccagtaattcgaaagagttactggattttaattttaggatccattcatcttgcatcactctctcctgagggtgtgagggtggagagtaggaggcgggccccaaggcatgcagagaggccaggagcccttacctgaagaaagagcctacctctgcacaggtcagcactattctgaccaaggctggccaccgtattctcagttgtcattttgaccatgctgttttccctctctgaagtctgggtatctgtcatgttggctctgaaatcaaaacaagacaccagcagtccaatcttcagagctaaataacccccacccccagcttcacttacctatatctccctcactgcctgaggacttggctcaggcagctggggtgccaagcctcggggcttgcatcttcctcctctgttctgcacatcactaaaactcagttttgaaatgtttatcataaatattatactaagggtctcctttcaaatgcaagtctctttgatgcctacacgtgtgcttgcgcacacacatgcgtgcacacatacacattcacacacaagtacacatgcatggacacatatatgttgacacacatgcacatgtacgtggatacataagcacatgctcccatgcatggatacacacaggcacacacacattctcactgcactgctctgcgttccacccttctagaggaaggcttgctccctccctctcagcctccctgctcctctgtctttttttgccatgcgtgtgttgagtggacactaaatgactggtcctgttttgggaactgaggatgcagtgattgatagacaagacccacagagatccccactgatcaagtaaacaaacaaatagtatcgttcccgactgtggtgagtgctgggtggagaagcaaatccaggaaggggataaaacgtgggaggggagtattttggaaagaatggcccggaaaggcctctcaggcaatgagacgtaaatgatgggatggaaggagccctgcaaagatccttctggtggtccagagagctgagcaaagataaaggccaggagataggaatgagcttggcgttcacaacagggatcaagagttccctctgaactacgacccttcaaacactcccatagaattttaggttaaaagaaccctggggccatccaacaaagcctccacatactgctgttcacgcccactcgatgtcgacctaaatattggcatgtgctaatcctgatttctgctggaaatccaggtctctctgaggagtatttgcaattttagcttcttaagggctcttatagaatttcagtgtcttcttagtaactctccctcagactcagaaagtgacagtaggacctgttctgaggggttctcaagcttagaactctaagccctttgcctgaaataaaagcttagcatgtatgtacatggggtcttctgcagccactaccctgcaaccatcctcctgccactgtgttcaagaggccatcccctgtacctctgaccttgtccggtggtctggctggttcactgtacttgctgcagttgctaagctggtgtttgtgtcctcttgttccagaacatgtattccctgtgttctgattctcttgtctgacttctgagccccttaaaaggctcactgtttttcttgggtagcttattggggttcagttctaatcattgcgaaatcctgggctgtgccagttcctcgagaggtggaaagtgatgggggaggcatgtaccttagagaacagtgatgtgggggtagaggcctctttgtccctgctgagtgaccagaaggaagctcccagattccagctctacagatgacaagaaagaaggctgcccaggctaactgaacgttcactgcatctcagacagacccggttaaaacacaaatatacgacactcgtgtattgaatccctactgattgaatatctcctgagtaaaaagacactgggtattaccctaacacataaaagggttaatatcttaaattaacactcctcacagtctcattcatttatcagaatagtgtgtatcaaagactgcaggcaatgggttctgaagacatgagacaggcaaatcttgagaaggtcaagaaataatacaaagcccagctcatagaagatggtcagtcaccacctacacacacaaacacgcacacacatacacagcccagtgaggccttgtgagaagctaaagccacacgaaggcccagggagcatacagaaaggtaagaagacagcaaagaccatcgtcttccaatgtggcctcctgtacactctgctggcaccagggcctaaggcatcctgtatcccaaaccagaaatgggagacaagccatcatttccagtaagagtcaaccttcctctgtttaacccccttccatggcttcctgctgctctcacagtagagacttactagcgtctgaggggtcagccttgtcttccttgccttgacccctggtctccagcctccaaccttgcccctagtctccagccttcaactttctggcctcctacaactccacaaatataccttccctctgtctggaattctctcatttccagcctaactcagctccttctgtgggatgattcaagatgcacattgttgtagaaacagctctgtcagcttcatggcagaacaaggccaagcccccagctagggttctgcttcaggtggtccccaatgtgtggttccttgtggctgttgtgtgggaactgtatccatctttggatctcatggatcgttccatagtgggtgctccaaaaccactgctaagttctgtgcttgcctaaaggccagggaagattttccaatccgtcttttattcagatctactttatttgagaagaatcataagcctcaacaaagtcaaagccctacttttatacctcggtgtagtttttaaagttcaccagcaagcagaaggatcacaatattgatgagctcttaaaaaatgcatgagggcccctgagtacaagccaagaattgtaatcgagtccctgcacatgggcctctgatatcaatctcacattatttatttagggtttttcctgcttgccgtttgggagtgaagattcatttaccaagagagattcttttactagttttcattaccatgctgcaacattaatattaaactcaaaaagtgttagatctcgtctgtctctggtatgggtggactctatgctcccctttgggaaccagctctttgacactatagtgttgttgcaagtctggtctctgtgttttttattgaaattgctggaactcaaggaaatcatcttttgcttcttacttttgcatcaatatccagctctatccaggcatagatctcaaaccttgttagaaattgatgaaagttcctttttatgtgtccgcagaggagattgaagccccaaaaactgtgattcacattcattcccacaaatttgggaaagcatcggcatgtttacagcctccaactaacaaagcattgcagaggaggaggaagaaggctaccccaaactgctttggaatatctggcccccagaaatgcatttcatttgttccacccttatccattaattcccaatacagatgtatgtaaccagtttcagtggtgagatacctcagagtataagaagggctcttttaggcttcaaggtgcctttagaaagtattgtgcctgggggggaggagccaagatggccgaataggaacagctcccgtctacagctcccagcctgagcgacgcagaagacgggtgatttcggcatttccatctgaggtaccgggttcatctcactagggagtgccagacagtgggcgcaggtcagtgggtgtgcacaccatgcgcgagccgaagcagggcgaggcattgcatcactcgggaagcacaggggtcagggagttccctttcctagtcaaagaaaggggtgacggacggcacctggaaaatcgggtcactcccacccgaatactgcgcttttctgacgagcttaaaacacggcgcaccacgagactatatcccgcacctggcttggagggtcccacacccactgagtcttgctgattgctagcacagcagtctgagatcaaactgcaaggcggcagtgaggctgggggaggggggccccccattgcccaggcttgcttagataaacaaagcagccaggaagctcgaactgggtggagcccaccacagctcaaggaggcctgcctgcctgcctctgtaggctccacctctaggggcagggcacagacaaacaaaaagacagcagtaacctctgcagactcaaatgtccctgtctgacagctttgaagagagcagtggtcctcccagtacgcagctggacatctgagaagggcagactgcctcctcaagtgggtccctgaccccggacccccgagcagcctaactgggaggcaccccccagcaggggcagactgacacctcacagggcagggtactccaacagacctgcagctgagggtcctgtctgttagaaggaaaactaacaaacagaaaggacatccacaccaaaaacccatctgtacatcaccatcatcaaagaccaaaagtagataaaaccacaaagatggggaaaaactggaaactctaaaaagcagagcgcctctcctctgccaaaggaatgcagttcctcaccagcaacggaacaaagctggacagagaatgactatgacaagctgagagaagaaggcttcagacgatcaaattactctgagctacaggaggacattcaaaccaaaggcaaagatgttgaaaactttgaaaaaaatttagaagaatgtataactagaataactaatacacagaagtgcttaaaggagctgatggagctgaaaaccaaggctcgagaactacgtgaagaatgcagaagcctcaggagccgatgcgatcaactggaagaaagggtatcagtgatggaagatgaaatgaatgaaatgaagcaagaagggaagtttagagaaaaaagaataaaaagaaatgagcaaagcctccaagaaatatgggactatgtgaaaagaccaaatctacgtctgattggtgtacctgaaagtgatggggagaatggaaccaagttgaaaaacactctgcaggatattatccaggagaacttccccaatctagcaaggcaggccaaagttcagattcaggaaatacagagaatgccacaaagatattccttgacaagagcaactccaagacacataattgtcagattcaccaaagttgaaatgaaggaaaaaatgttaagggcagccagagagaaaggttgggttacccacaaaggaaagcctatcagactaagagtggatctctcagcagaaactctacaagccagaagagagtgggggccaatattcaacattcttaaagaaaagaattttcaacccagaatttcatatccagccaaactaagcttcataagtgaaggagaaataaaatactttacagacaagcaaatgctgagagattttgtcaccaccaggccggccctaaaagagctcctaaaggaagcactaaacatggaaaggaacaaccagtaccagtcactgcaaaaacatgccaaattgtaaagactgtcgaggctaggaagaaactgcatcaactaacgagcaaaataaccagctaacatcataatgacaggatcaaatacacacataacaatattaactttacatgtaaatggactaaatgctccaattaaaagacacagtctggcaaattggataaagagtcaagacccatcagtgtgctgtattcaggaaacccatctcacgtgcagagacacacataggctcaaaataaaaggatggaggaagatctaccaagcaaatggaaaacaaaaaaaggcaggggttgcaatcctagtctcagataaaacagacttcaaaccaacaaagatcaaaagagacaaagaaggccattacataatggtaaagggatcaattcaacaagaagagctaactatcctaaatatatatgcacccaatacaggagcacccagattcataaagcaagtcctgagtgacctacaaagagacttagactcccacacattaataatgggagactttaacaccccactgtcaacattagacagatcaacgagacagaaagtcaacaaggatacccaggaattgaactcagctctgcaccaagtggacctaatagacatctacagaactctccaccccaaatcaacagaatacacatttttttcagcaccacaccacacgtattccaaaattgaccacatacttggaagtaaagctctcctcagcaaatgtaaaagaacagaaattataacaaactatctctcagaccacagtgcaatcaaactagaactcaggattaagaatctcactcaaaaccgctcaactacatggaaactgaacaacctgctcctgaatgactactgggtacataacgaaatgaagctagaaataaagatgttctttgaaaccaacgagaacaaagacacaacataccagaatctctgggacgcattcaaagcagtgtatagagggaaatttatagcactaaatgcccacaagagaaagcaggaaagatccaaaattgacaccctaacatcacaattaaaagaactagaaaagcaagagcaaacacattcaaaagctagcagaaggcaagaaataactaaaatcagagcagaactgaaggaaatagagacacaaaaaacccttcaaaaaattaatgaatccaggagctggttttttgaaaggatcaacaaaatagatagactgctagcaagactaataaagagaaaaagagagaagaatcaaatagatgcaataaaaaatgataaaggggacatcaccaccaatcccacagaaatacaaactaccatcagagaatactacaaacacctctacgcaaataaactagaaaatctagaagaaatggataaattcctcgacacatacactctcccaagactaaaccaggaagaagttgaatctctgaatagaccaataacaggatctgaaattgtggcaataatcaatagcttaccaaccaaaaagagtccaggaccagatggattcacagccgaattctaccagaggtacaagaaggaactggtaccattccttctgaaactattccaatcaatagaaaaagagggaatcctccctaactcattttatgaggccagcatcattctgataccaaagccaggcagagacacaaccaaaaaagagaattttagaccaatatccttgatgaacattgatgcaaaaaccctcaataaaatactggcagaccgaatccagcagcacatcaaaaagcttatccaccatgatcaagtgggcttcatccctgggatgcaaggctggttcaatatacacatatcaataaatgtaatccagcatataaacagagccaaagacaaaaaccacatgattatctgcatagatgcagaaagggcctttgacaaaattcaacaacccttcatgctaaaaactcttaataaattaggtattgatgggacgtatttcaaaataataagagctatctatgacaaacccacagccaatatcatactgaatgggcaaaaactggaagcattcccttgaaaactggcacaagacagggatgccctctctcaccactccta
